(19) United States
(12) Patent Application Publication
(10) Pub. No.: US 2006/0183120 A1
(43) Pub. Date: Aug. 17, 2006

(54) Molecular sub-classification of kidney tumors and the discovery of new diagnostic markers

(76) Inventors: Bin Tean Teh, Ada, MI (US); Masayuki Takahashi, Tokushima (JP)

Correspondence Address: MCKENNA LONG & ALDRIDGE LLP, 1900 K STREET, NW, WASHINGTON, DC, 20006, US

(21) Appl. No.: 10/530,187

(22) PCT Filed: Oct. 6, 2003
(86) PCT No.: PCT/US03/31476

§ 371 Date: Feb. 27, 2006

(30) Foreign Application Priority Data
Oct. 4, 2002 (US) 60415775

(51) Int. Cl. C12Q 1/68; G01N 33/574; C07H 21/04; C12M 1/34; C07K 14/82

(52) U.S. Cl. 435/6; 435/7.23; 435/287.2; 530/350; 536/23.5

(57) ABSTRACT

Genes that are differentially expressed in subtypes of renal cell carcinomas are disclosed as are their polypeptide products. This information is utilized to produce nucleic acid and antibody probes and sets of such probes that are specific for these genes and their products. Methods employing these probes, including hybridization and immunological methods, are used to determine the subtype of a renal cell tumor sample from a subject based on the differential expression of such genes that is characteristic of the cancer subtype.

[0001] This application claims the benefit of the filing date of U.S. Provisional application Ser. No. 60/415,775, filed Oct. 4, 2002, which is incorporated by reference herein in its entirety.

### BACKGROUND OF THE INVENTION

[0002] 1. Field of the Invention

[0003] The present invention in the field of molecular biology and medicine relates, e.g., to gene expression profiling of certain types of kidney cancer and the use of the profiles to, e.g., identify diagnostic markers in patients.

[0004] 2. Description of the Background Art

[0005] Renal cell carcinoma (RCC) is the most common malignancy of the adult kidney, representing 2% of all malignancies and 2% of cancer-related deaths. The incidence of RCC is increasing and the increase cannot be explained by the increased use of abdominal imaging procedures alone. (Chow et al., JAMA 1999; 281(17): 1628-31).

[0006] RCC is a clinicopathologically heterogeneous disease, traditionally subdivided into clear cell, granular cell, papillary, chromophobe, spindle cell, cystic, and collecting duct carcinoma, based on morphological features according to the WHO International Histological Classification of Kidney Tumors (Mostfi, F K et al., 1998). Clear cell RCC(CC-RCC) is the most common adult renal neoplasm, representing 70% of all renal neoplasms, and is thought to originate in the proximal tubules. Papillary RCC accounts for 10-15%, chromophobe RCC 4-6%, collecting duct carcinoma<1%, and unclassified 4-5% of RCC. Spindle RCC, also called sarcomatoid RCC, is characterized by prominent spindle cell features, and is thought to represent the high-grade end of the subgroups. Granular cell RCC, which is no longer considered a subtype in the current classification systems, is still being used by many pathologists around the world. Instead, granular RCC can often be reclassified into other subtypes (Storkel et al., Cancer 1997; 80: 987-9).

[0007] With recent advances in molecular genetics, the subtypes of RCC have been associated with distinct genetic abnormalities. This association has led to a proposal for molecular diagnosis of RCC (Bugert et al., Am J Pathol 1996; 149:2081-2088). The majority of clear cell RCC, for example, has a loss of chromosome 3 and inactivating mutations of the VHL gene, whereas papillary RCC are frequently associated with trisomy of chromosomes 3q, 7, 12, 16, 17 and 20, and loss of the Y chromosome. A portion of them also harbor MET mutations. It has been proposed that, even in the absence of prominent papillae, these aberrant chromosomal features could support the diagnosis of papillary RCC. Conversely, kidney cancers that do not possess these genetic characteristics should not be designated as papillary RCC even when papillary structures are prominent (Storkel et al., 1997 supra). Frequent loss of sex chromosomes, chromosomes 1 and 14 have been found in renal oncocytoma, a rarely metastasizing entity composed of acinar-arranged, large eosinophilic cells (Presti et al., Genes Chromosomes Cancer 1996; 17:199-204). Accurate subtyping of renal tumors is important for predicting prognosis and designing treatment for patients.

[0008] Microarray technology can provide insights into underlying molecular mechanisms of many types of cancers. Gene expression profiles obtained with microarray technology can serve as the molecular signatures of cancer, and may be used to distinguish among histological subtypes as well as the discovery of novel distinct subtypes that correlate with clinical parameters. Such distinctions may reflect, e.g., the heterogeneity in transformation mechanisms, cell types, or aggressiveness among tumors. For example, approximately 100 genes were identified as differentially expressed in serous ovarian cancers as compared to mucinous type (Ono et al., Cancer Res 2000; 60(18):5007-11). Other studies have identified distinct gene sets that distinguish between acute myeloid leukemia and acute lymphoblastic leukemias (Golub et al., Science 1999; 286:531-537), between hereditary breast cancer with BRCA1 and BRCA2 mutations (Hedenfalk et al., N. Engl J Med 2001; 344:539-548), between hepatitis-B and hepatitis C-positive hepatocellular carcinomas (Okabe et al., Cancer Res 2001; 61:2129-37) and between diffuse large B-cell lymphoma with good and poor prognosis.

[0009] In general, diagnosis of RCC is currently performed by histologic analysis. Corporal imaging methods, e.g., ultrasonography, CT scans and X-rays, are also used. These modalities lack the rigor to distinguish fully among the various types of RCCs, and are sometimes slow and laborious. The marked heterogeneity of RCCs provides a great challenge in diagnosis and treatment. This complicates prognosis and hinders selection of the most appropriate therapy. There is a need for additional methods that can supplement or supplant the available diagnostic approaches for differentiating among the types of RCC.

### DESCRIPTION OF THE INVENTION

[0010] The present invention relates, e.g., to the identification of genes and gene products (molecular markers) whose expression is upregulated in a large percentage of RCCs of a particular sub-type, e.g., CC-RCC, papillary RCC, chromophobe-RCC/oncocytoma, sarcomatoid-RCC, TCC, or Wilms' tumor (WT), compared to a baseline value. As used herein, a “baseline value” includes, e.g., the expression in other types of RCC or normal renal tissue, such as from the same subject or from a “pool” of normal subjects, whether obtained at the same time as a sample from an RCC, or available in a generic database. For example, about 30 molecular markers are identified herein as significantly more highly expressed in CC-RCC than in the other subtypes studied or in normal kidney tissue; about 30 such molecular markers are identified for papillary-RCC; about 30 such molecular markers are identified for chromophobe-RCC/oncocytoma-RCC; about 29 such molecular markers are identified for sarcomatoid-RCC; about 74 such molecular markers are identified for TCC; and about two such molecular markers are identified for Wilms' tumor.

[0011] These molecular markers (molecular signatures) can serve as the basis for diagnostic assays to distinguish among these sub-types of RCCs. For example, nucleic acid probes corresponding to one or more of the overexpressed genes, and/or antibodies specific for proteins encoded by them, can be used to analyze a sample from a renal tumor, in order to determine to which subtype the tumor belongs. Assays of this type can detect the differential expression of certain selected genes, expressed sequence tags (ESTs), gene fragments, mRNAs, and other polynucleotides as described herein. In a preferred embodiment, the samples are tissues (e.g., sections of paraffin-embedded blocks) or tissue extracts (e.g., preparations of nucleic acid and/or protein). The overexpressed genes and gene products can also serve to identify therapeutic targets, e.g. genes which are commonly overexpressed in one of the renal cancer subtypes, or proteins whose activity is enhanced. For example, one can focus on developing drugs that (1) suppress up-regulation, for example by acting on a cellular pathway that stimulates expression of this gene, (2) act directly on the protein product, or (3) bypass the step in a cellular pathway mediated by the product of this gene. The overexpressed genes can also provide a basis for explaining the different metabolic processes exhibited by the different sub-types of renal tumors, and can be used as research tools.

[0012] One aspect of the invention is a composition (combination) comprising
[0013] (a) at least about one, two, five or ten isolated nucleic acids from the set represented by SEQ ID NOs: 1-30 from Table 1, or fragments thereof which nucleic acids hybridize specifically to the nucleic acids of genes that are overexpressed (upregulated) in a large percentage of CC-RCC, and/or
[0014] (b) at least about one, two, five or ten isolated nucleic acids from the set represented by SEQ ID NOs: 31-60 from Table 2, or fragments thereof which nucleic acids hybridize specifically to the nucleic acids of genes that are overexpressed (upregulated) in a large percentage of papillary-RCC), and/or
[0015] (c) at least about at least about one, two, five or ten isolated nucleic acids from the set represented by SEQ ID NOs: 61-90 from Table 3, or fragments thereof which nucleic acids hybridize specifically to the nucleic acids of genes that are overexpressed (upregulated) in a large percentage of chromophobe RCC, and/or
[0016] (d) at least about at least about one, two, five or ten isolated nucleic acids from the set represented by SEQ ID NOs: 91-119 from Table 5, or fragments thereof. These nucleic acids hybridize specifically to the nucleic acids of genes that are overexpressed (upregulated) in a large percentage of sacomatoid RCC), and/or
[0017] (e) at least about at least about one, two, five or ten isolated nucleic acids from the set represented by SEQ ID NOs: 120-193 from Table 6, or fragments thereof. (These nucleic acids hybridize specifically to the nucleic acids of genes that are overexpressed (upregulated) in a large percentage of TCC), and/or
[0018] (f) one or two isolated nucleic acids from the set represented by SEQ ID NOs: 194 and 195, or fragments thereof which nucleic acids hybridize specifically to the nucleic acids of genes that are overexpressed (upregulated) in a large percentage of Wilms' tumor).
   In one embodiment of this invention, nucleic acid sequences corresponding to genes that have been previously reported to be differentially overexpressed in CC-RCC, papillary RCC, chromophobe-RCC/oncocytoma, sarcomatoid RCC, TCC, or Wilms' tumors are excluded from the composition described above.

[0019] The length of each of the preceding nucleic acid fragments in the above combinations is preferably at least about 8 or at least about 15 contiguous nucleotides of the sequences. As used herein, the term “preferably” is to be understood to mean “not necessarily.”

[0020] The preceding nucleic acids (represented by the SEQ ID NOs) can be used as probes to identify (e.g., by hybridization assays) polynucleotides that are overexpressed in the indicated RCC subtypes. A skilled worker will recognize how to select suitable fragments of those nucleic acids that will also hybridize specifically to the polynucleotides of interest.

[0021] As noted, combination (a), (b), (c), (d), or (e) above may comprise any combination of, e.g., about 5, 8, or 10 nucleic acids from each of the indicated sets of nucleic acids (from Tables 1, 2, 3, 5 and 6, respectively). Preferably, the nucleic acids in such a set or “subgroup” share a common core structure, a common function or another property.

[0022] More specifically, the isolated nucleic acids of a composition of the invention may comprise 1 or any combination of 2, 3, 4, or 5 nucleic acids represented by each of the following groups of sequences:
[0023] (a) SEQ ID NO:1; SEQ ID NO:2; SEQ ID NO:3; SEQ ID NO:5; and/or SEQ ID NO:6 (preferably all five nucleic acids are present); and/or
[0024] (b) SEQ ID NO:31; SEQ ID NO:33; SEQ ID NO:34; SEQ ID NO:35; and/or SEQ ID NO:36; (preferably all five nucleic acids are present); and/or
[0025] (c) SEQ ID NO:61; SEQ ID NO:62; SEQ ID NO:64; SEQ ID NO:65; and/or SEQ ID NO:66; (preferably all five nucleic acids are present); and/or
[0026] (d) SEQ ID NO:91; SEQ ID NO:92; SEQ ID NO:93; SEQ ID NO:94; and/or SEQ ID NO:95; (preferably all five nucleic acids are present); and/or
[0027] (e) SEQ ID NO:120; SEQ ID NO:121; SEQ ID NO:122; SEQ ID NO:123; and/or SEQ ID NO:125; (preferably all five nucleic acids are present), and/or
[0028] (f) one or two of SEQ ID NO:194 and/or SEQ ID NO:195,
   and/or a fragment that comprises at least about 8 or at least about 15 contiguous nucleotides of any one of the above sequences.

[0029] In one embodiment, the fifth nucleic acid in (e) is SEQ ID NO:124.

[0030] As used herein, the singular forms “a,” “an,” and “the” include plural referents unless the context clearly dictates otherwise. For example, “a” fragment, as used above, means one or more fragments, which can include, e.g., fragments of two different nucleic acids.

[0031] In another aspect, a composition of the invention may comprise a set of two or more nucleic acids (e.g., polynucleotide probes), each of which hybridizes with part or all of a coding sequence that is up-regulated (overexpressed) in CC-RCC, papillary RCC, chromophobe/oncocytoma RCC, sarcomatoid RCC, TCC, or Wilms' tumors, compared to a baseline value. The composition may comprise, e.g., a set of at least about five of these nucleic acids, or a set of at least about ten of these nucleic acids.

[0032] In the nucleic acid compositions of the invention, one or more phosphates in the helix may be modified, for example, as a phosphorothioate, a phosphoridothioate, a phosphoramidothioate, a phosphoramidate, a phosphordiimidate, a methylsphosphonate, an alkyl phosphotriester, 3′-aminopropyl, a formacetal, or an analogue thereof. The isolated nucleic acid may be of mammalian, preferably of human origin.

[0033] One embodiment of the invention is a composition comprising molecules (e.g., nucleic acids, proteins or antibodies) in the form of an array, preferably a microarray. A further discussion of arrays is presented below. A nucleic acid array may further comprise, bound to one or more nucleic acids of the array, one or more polynucleotides from a skample comprising expressed genes. The sample may be from an individual subject's renal tumor, from a normal tissue, or both. In one embodiment, the nucleic acids in an array and the polynucleotide(s) from a sample of expressed genes have been subjected to nucleic acid hybridization under high stringency conditions (such that nucleic acids of the array that are specific for particular polynucleotides from the sample are specifically hybridized to those polynucleotides).

[0034] By the term an “isolated” nucleic acid (or polypeptide, or antibody) is meant herein a nucleic acid (or polypeptide, or antibody) that is in a form other than it occurs in nature, for example in a buffer, in a dry form awaiting reconstitution, as part of an array, a kit or a pharmaceutical composition, etc. By a sequence “corresponding to” a gene, or “specific for” a gene, is meant a sequence that is substantially similar to (e.g., hybridizes under conditions of high stringency to) one of the strands of the double stranded form of that gene. By hybridizing “specifically” is meant herein that two components e.g. an expressed gene or polynucleotide and a nucleic acid. e.g., a probe, bind selectively to each other and not generally to other components to which binding is not intended. The conditions for such specific interactions can be determined routinely by one skilled in the art.

[0035] Another embodiment of the invention is a combination (composition) comprising polypeptides that are of a size and structure that can be recognized and bound by an antibody or other selective binding partner. Specifically the combination (composition) comprises:
[0036] (a) at least about one, two, five or ten isolated polypeptides each encoded by a nucleic acid from the set represented by SEQ ID NOs: 1-30 from Table 1, or antigenic fragments that comprise at least about 8 or at least about 12 contiguous amino acids of said polypeptides, and/or
[0037] (b) at least about one, two, five or ten isolated polypeptides each encoded by a nucleic acid from the set represented by SEQ ID NOs: 31-60 from Table 2, or antigenic fragments that comprise at least about 8 or at least about 12 contiguous amino acids of said polypeptides, and/or
[0038] (c) at least about one, two, five or ten isolated polypeptides each encoded by a nucleic acid from the set represented by SEQ ID NOs: 61-90 from Table 3, or antigenic fragments that comprise at least about 8 or at least about 12 contiguous amino acids of said polypeptides, and/or
[0039] (d) at least about one, two, five or ten isolated polypeptides each encoded by a nucleic acid from the set represented by SEQ ID NOs: 91-119 from Table 5, or antigenic fragments that comprise at least about 8 or at least about 12 contiguous amino acids of said polypeptides, and/or
[0040] (e) at least about one, two, five or ten isolated polypeptides each encoded by a nucleic acid from the set represented by SEQ ID NOs: 120-193 from Table 6, or antigenic fragments that comprise at least about 8 or at least about 12 contiguous nucleotides of said polypeptides, and/or
[0041] (f) one or two isolated polypeptides each encoded by a nucleic acid from the set represented by SEQ ID NOs: 194 and 195, or antigenic fragments that comprise at least about 8 or at least about 12 contiguous amino acids of said polypeptides.

[0042] Combination (a), (b), (c), (d) or (e) above may comprise any combination of, e.g., about any 5, 8, or 10 polypeptides from each of the indicated sets of polypeptides. Preferably, the polypeptides in such a subgroup share a common core structure, a common function or another property.

[0043] More specifically, the isolated polypeptides of a composition of the invention may comprise 1 or any combination of 2, 3, 4, or 5 polypeptides encoded by the nkucleic acids represented by each of the following sets of sequences:
[0044] (a) SEQ ID NO:1; SEQ ID NO:2; SEQ ID NO:3; SEQ ID NO:5; and/or SEQ ID NO:6; (preferably all five polypeptides are present); and/or
[0045] (b) SEQ ID NO:31; SEQ ID NO:33; SEQ ID NO:34; SEQ ID NO:35; and/or SEQ ID NO:36; (preferably all five polypeptides are present); and/or
[0046] (c) SEQ ID NO:61; SEQ ID NO:62; SEQ ID NO:64; SEQ ID NO:65; and/or SEQ ID NO:66; (preferably all five polypeptides are present); and/or
[0047] (d) SEQ ID NO:91; SEQ ID NO:92; SEQ ID NO:93; SEQ ID NO:94; and/or SEQ ID NO:95; (preferably all five polypeptides are present); and/or
[0048] (e) SEQ ID NO:120; SEQ ID NO:121; SEQ ID NO:122; SEQ ID NO:123; and/or SEQ ID NO:125; (preferably all five polypeptides are present); and/or
[0049] (f) one or two of SEQ ID NO:194 and/or SEQ ID NO:195;
   and/or an antigenic fragment that comprises at least about 8 or at least about 12 contiguous amino acids of the above polypeptides.
   In one embodiment, the fifth polypeptide in (e) is encoded by an ORF of SEQ ID NO:124.

[0050] A skilled worker can readily determine the amino acid sequence encoded by an open reading frame of any of the nucleic acids noted above.

[0051] For example, one embodiment of the invention is a combination (composition) comprising the following polypeptides:
[0052] (a) at least about one, two, five or ten isolated polypeptides from the set represented by SEQ ID NOs: 196-220 from Table 1, or antigenic fragments thereof that comprise at least about 8 or at least about 12 contiguous amino acids of said polypeptide sequences, and/or
[0053] (b) at least about one, two, five or ten isolated polypeptides from the set represented by SEQ ID NOs: 221-247 from Table 2, or antigenic fragments thereof that comprise at least about 8 or at least about 12 contiguous amino acids of said polypeptide sequences, and/or
[0054] (c) at least about one, two, five or ten isolated polypeptides from the set represented by SEQ ID NOs: 248-270 from Table 3, or antigenic fragments thereof that comprise at least about 8 or at least about 12 contiguous amino acids of said sequences, and/or
[0055] (d) at least about one, two, five or ten isolated polypeptides from the set represented by SEQ ID NOs: 271-296 from Table 5, or antigenic fragments thereof that comprise at least about 8 or at least about 12 contiguous amino acids of said sequence(s)

[0056] The composition may also include any of the polypeptides indicated above as being encoded by one of the mentioned nucleic acids (e.g., the polypeptides of e and f).

[0057] Each of (a), (b), (c), (d) or (e) above may comprise any combination of, (e.g., about any 5, 8, or 10 polypeptides from each of the indicated sets of polypeptides. Preferably (but not necessarily), the polypeptides in such a subgroup share a common core structure, or a common function or other property.

[0058] More specifically, the isolated polypeptides of a composition of the invention may comprise any combination of 1, 2, 3, 4, or 5 polypeptides represented by the following sets of sequences:
[0059] (a) SEQ ID NO:196; SEQ ID NO:197; SEQ ID NO:198; SEQ ID NO:199 or 200; and/or SEQ ID NO:201; (preferably all five polypeptides are present); and/or
[0060] (b) SEQ ID NO:221; SEQ ID NO:222; SEQ ID NO:223; SEQ ID NO:224; and/or SEQ ID NO:225; (preferably all five polypeptides are present); and/or
[0061] (c) SEQ ID NO:248; SEQ ID NO:249; SEQ BD NO:250; SEQ ID NO:251; and/or SEQ ID NO:252; (preferably all five polypeptides are present); and/or
[0062] (d) a polypeptide encoded by an ORF of SEQ ID NO:91 (ubiquitin thiolesterase); SEQ ID NO:271 or 272; SEQ ID NO:273; a polypeptide encoded by an ORF of SEQ ID NO:94 (H. sapiens α-1 (VI) collagen); and/or SEQ ID NO:274; (preferably all five polypeptides are present); and/or
[0063] (e) a polypeptide encoded by an ORF of SEQ ID NO:120 (keratin 14); or of SEQ ID NO:121 (collagen type VII, alpha1); or of SEQ ID NO:122 (keratin 19); or of SEQ ID NO:123 (plexin B3) and/or of SEQ ID NO:125 (integrin beta4); (preferably all 5 polypeptides are present) [in one embodiment, the polypeptide is encoded by an ORF of SEQ ID NO:124 (similar to rat collagen alpha1 (MD chain); and/or
[0064] (f) a polypeptide encoded by SEQ ID NO:194 (heparin sulfate proteoglycan) and/or by SEQ ID NO:195 (IGF II);
   and/or an antigenic fragment thereof. Such a fragment may comprise at least about 8 or at least about 12 contiguous amino acids of the above sequences.

[0065] Another aspect of the invention is a composition comprising an antibody or a combination of antibodies specific for the polypeptides described herein which may be used for the same purposes as the polypeptides. As used herein, an antibody that is “specific for” a polypeptide includes an antibody that binds selectively to the polypeptide and not generally to other polypeptides to which binding is not intended. The conditions for such specificity can be determined routinely using conventional methods.

[0066] One aspect of the invention is a composition comprising selected numbers of such antibodies in a form that permits their binding to the polypeptides for which they are specific. Such a composition may comprise:
[0067] (a) at least about one, two, five or ten isolated antibodies that are specific for polypeptides encoded by nucleic acids represented by SEQ ID NOs: 1-30 from Table 1, or specific for antigenic fragments thereof, and/or
[0068] (b) at least about one, two, five or ten isolated antibodies that are specific for polypeptides encoded by nucleic acids represented by SEQ ID NOs: 31-60 from Table 2, or specific for antigenic fragments thereof, and/or
[0069] (c) at least about one, two, five or ten isolated antibodies that are specific for polypeptides encoded by nucleic acids represented by SEQ ID NOs: 61-90 from Table 3, or specific for antigenic fragments thereof, and/or
[0070] (d) at least about one, two, five or ten isolated antibodies that are specific for polypeptides encoded by nucleic acids represented by SEQ ID NOs: 91-119 from Table 5, or specific for antigenic fragments thereof, and/or
[0071] (e) at least about one, two, five or ten isolated antibodies that are specific for polypeptides encoded by nucleic acids represented by SEQ ID NOs: 120-193 from Table 6, or specific for antigenic fragments thereof, and/or
[0072] (f) one or two isolated antibodies that are specific for polypeptides encoded by nucleic acids represented by SEQ ID NOs: 194-195, or specific for antigenic fragments thereof.
   Here too, the fragments preferably comprise at least about 8 or about 12 contiguous amino acid residues of the polypeptide.

[0073] The antibodies in any of the above compositions (including subsets) may be provided in the form of an array, such as a microarray.

[0074] This invention is also directed to a method for detecting (e.g., measuring, or quantitating) one or more polynucleotides, or polypeptides encoded by those polynucleotides, in a sample, such as a sample from an RCC tumor. The method comprises contacting the sample with a composition of nucleic acids, or of antibodies, of the invention, under conditions which permit (a) binding of the nucleic acids to the sample polynucleotides (such as hybridization under conditions of high stringency), or (b) binding of the antibodies to sample polypeptides. The method further comprises detecting the sample polynucleotides or antibodies which have bound. Preferably, the polynucleotides or polypeptides that are ones which are overexpressed (upregulation) in the sample and are indicative of a specific subtype of RCC. Detection of the polynucleotides or polypeptides thus identify the specific subtype of the RCC.

[0075] The invention provides a method for determining the subtype of a RCC in a subject, comprising
[0076] (a) hybridizing a nucleic acid composition of the invention, under conditions of high stringency, to a polynucleotide sample obtained from the renal carcinoma of the subject (the sample may be in the form of a tissue fragment or extract); and
[0077] (b) comparing the amount of one or more of the sample polynucleotides hybridized to one or more nucleic acids in the composition to a baseline value of hybridization.

[0078] The baseline value may be obtained, for example, by hybridizing the nucleic acid composition, under conditions of high stringency, to polynucleotides from normal kidney tissue, e.g., from the same subject or from a “pool” of normal individuals. Alternatively, the baseline value may be obtained from an existing database of such values.

[0079] The amount of a sample polynucleotide hybridized to a nucleic acid in the composition generally reflects the level of, i.e., the expression of, the polynucleotide in the renal tumor.

[0080] Another embodiment is a method for determining the subtype of an RCC in a subject, comprising:
[0081] (a) examining expression in RCC tumor tissue from the subject of polynucleotides that hybridize at high stringency conditions with at least one or at least two nucleic acids, or fragments thereof, which nucleic acids are described herein as being overexpressed or upregulated in a particular type of kidney tumor,
[0082] (b) examining expression in the subject's normal kidney tissue of polynucleotides that hybridize at high stringency conditions with the nucleic acids noted in (a); and
[0083] (c) comparing the expression in tumor tissue in (a) with the expression in normal tissue in (b).

[0084] In further embodiments of the above methods for determining the subtype of a renal cell carcinoma, the polynucleotide from tumor (and, optionally, from normal tissue) is labeled with a detectable label, such as a fluorescent label.

[0085] Other embodiments of the above methods are based on a relationship between a particular level of expression of particular DNA sequences (represented, e.g., by a particular level of hybridization) as being diagnostic of the RCC subtype. Examples of such relationships are:
[0086] (i) when expression, determined by hybridization to nucleic acids represented by SEQ ID NOs: 1-30, is up-regulated, e.g., at least about 5-fold, in tumor tissue compared to normal kidney tissue, the renal tumor is CC-RCC,
[0087] (ii) when the expression, determined by hybridization to nucleic acids represented by SEQ ID NOs: 31-60 is up-regulated, e.g., at least about 3-fold, in tumor tissue compared to normal kidney tissue, then the renal tumor is papillary RCC,
[0088] (iii) when the expression, determined by hybridization to nucleic acids polynucleotides represented by SEQ ID NOs: 61-90, is up-regulated, e.g., at least about 5-fold, in tumor tissue compared to normal kidney tissue, then the renal tumor is chromophobe-RCC/oncocytoma,
[0089] (iv) when the expression, determined by hybridization to nucleic acids represented by SEQ ID NOs: 91-119 is up-regulated in tumor tissue compared to normal kidney tissue, then the renal tumor is sarcomatoid-RCC,
[0090] (v) when the expression, determined by hybridization to nucleic acids represented by SEQ ID NOs: 120-193 is up-regulated in tumor tissue compared to normal kidney tissue, then the renal tumor is transitional cell carcinoma (TCC), and
[0091] (vi) when the expression, determined by hybridization to nucleic acids represented by SEQ ID NOs: 194-195 is up-regulated in tumor tissue compared to the normal kidney tissue, the renal tumor is Wilms' tumor (WT).

[0092] Another aspect of the invention is a method for determining the subtype of an RCC in a subject, comprising detecting one or more polypeptide (protein) products whose expression is upregulated in a majority of subjects with a subtype of RCC as discussed herein. Such detecting includes determining the presence of, and/or measuring the amount of the polypeptide.

[0093] Another aspect of the invention is a method for determining the subtype of an RCC in a subject, comprising
[0094] (a) contacting an antibody composition of the invention with a polypeptide sample obtained from a renal carcinoma under conditions effective for the at least one of the antibodies to bind specifically to a polypeptide for which it is specific; and
[0095] (b) comparing the amount of binding of the one or more of the polypeptides in the sample to the one or more antibodies in the composition to a baseline value.
   The sample may be a tissue fragment or extract.

[0096] The baseline value may be obtained, for example, by contacting the antibody composition, under similar conditions, to a polypeptide sample obtained from normal kidney tissue, e.g., from the same subject or from a “pool” of normal individuals.

[0097] The amount of sample polypeptide bound to an antibody specific for it in the antibody composition generally reflects the level of expression of the polypeptide in the renal tumor.

[0098] For example, one embodiment is a method for determining the subtype of an RCC in a subject, comprising
[0099] (a) contacting RCC tissue or an extract thereof with
   [0100] (i) an antibody specific for one polypeptide or antibodies specific for two or more polypeptides encoded by nucleic acids represented by SEQ ID NOs: 1-30 from Table 1, or antibodies specific for a fragment of the polypeptide(s), under conditions in which the antibody or antibodies bind specifically to proteins that are relatively overexpressed in CC-RCC, and/or
   [0101] (ii) an antibody specific for one polypeptide or antibodies specific for two or more polypeptides encoded by nucleic acids represented by SEQ BD NOs: 31-60 from Table 2, or antibodies specific for a fragment of the polypeptide(s), under conditions in which the antibody or antibodies bind specifically to proteins that are relatively overexpressed in papillary RCC, and/or
   [0102] (iii) an antibody specific for one polypeptide or antibodies specific for two or more polypeptides encoded by nucleic acids represented by SEQ ID NOs: 61-90 from Table 3, or antibodies specific for a fragment of the polypeptide(s), under conditions in which the antibody or antibodies bind specifically to proteins that are relatively overexpressed in chromophobe RCC/oncocytoma, and/or
   [0103] (iv) an antibody specific for one polypeptide or antibodies specific for two or more polypeptides encoded by nucleic acids represented by SEQ ID NOs: 92, 93 and/or 103 or antibodies specific for a fragment of the polypeptide(s), under conditions in which the antibody or antibodies bind specifically to proteins that at relatively overexpressed in sarcomatoid RCC, and/or
   [0104] (v) an antibody specific for one polypeptide or antibodies specific for two or more polypeptides encoded by nucleic acids represented by SEQ ID NOs: 120, 121, 122, 125 and/or 126, or antibodies specific for a fragment of the polypeptide(s), under conditions in which the antibody or antibodies bind specifically to proteins that at relatively overexpressed in TCC, and/or
   [0105] (vi) an antibody specific for one or both polypeptides encoded by nucleic acids represented by SEQ ID NOs: 194-195, or antibodies specific for a fragment of the polypeptide(s), under conditions in which the antibody or antibodies bind specifically to proteins that at relatively overexpressed in Wilms' tumor,
[0106] (b) detecting or measuring the antibodies bound to said tissue or extract;,
[0107] (c) contacting a normal kidney tissue or an extract thereof obtained, e.g., from said subject or from a pool of normal kidney tissue, with one or more of said antibodies of (a)(i)-(a)(vi),
[0108] (d) detecting or measuring the antibodies bound to said normal kidney tissue or extract, and
[0109] (e) comparing the amount of binding in (b) and (d).

[0110] In other embodiments, any of the antibody compositions described herein (e.g., a subset of the antibodies) may be substituted for the antibodies described in (a)(i)-(a)(vi) above.

[0111] In any of the above methods for determining the RCC subtype, the composition may be in the form of an array, such as a microarray.

[0112] Another aspect of the invention is a kit comprising a composition of nucleic acids of the invention (e.g., in the form of an array) and, optionally, one or more reagents that facilitate hybridization of the nucleic acid in the composition to a test polynucleotide, or that facilitate detection of the test polynucleotide (e.g., detection of fluorescence). The kit may comprise an array of nucleic acids of the invention, means for carrying out hybridization of the nucleic acid in the array to a test polynucleotide of interest, and means for reading hybridization results. Hybridization results may be units of fluorescence.

[0113] Another kit comprises a composition of antibodies of the invention (e.g., in the form of an array) and, optionally, one or more reagents that facilitate binding of the antibodies with test polypeptides, or that facilitate detection of antibody binding.

[0114] Kits of the invention may comprise instructions for carrying out the hybridization or antibody binding.

[0115] Other optional elements of the present kits include suitable buffers, culture medium components, or the like; a computer or computer-readable medium for storing and/or evaluating the assay results; containers; or packaging materials. Reagents for performing suitable controls may also be included. The reagents of the kit may be in containers in which the reagents are rendered stable, e.g., in lyophilized form or stabilized liquids. The reagents may also be in single use form, e.g., in single reaction form for diagnostic use.

[0116] As used herein, the terms “nucleic acid” and “polynucleotide” refer to both DNA (including cDNA) and RNA, as well as peptide nucleic acids (PNA) or locked nucleic acids (LNA). The terms nucleic acid and polynucleotide are not intended to be limited to a particular number of nucleotides, and therefore overlap in length with oligonucleotides. Nucleic acid for gene expression analysis include those comprising ribonucleotides, deoxyribonucleotides, both, or their analogues as described below. A probe may be or may comprise a nucleic acid, without limitation of length. Preferred lengths are described below. Nucleic acids of the invention include double stranded and partially or completely single stranded molecules. In a preferred embodiment, probes for gene expression comprise single stranded nucleic acid molecules that are complementary to an mRNA target expressed by a gene of interest, or that are complementary to the opposite strand (e.g., complementary to a first strand cDNA generated from the mRNA).

[0117] The present invention uses nucleic acids to probe for, and to determine the relative expression of, target genes (referred to more generally as polynucleotides) of interest in a tissue sample, or in an extract thereof. Preferred tissue is renal tumor tissue. Expression is compared to expression of that same target in a different type of renal tumor or in normal kidney tissue.

[0118] A composition comprising nucleic acids of the invention can take any of a variety of forms. For example, the combination of isolated nucleic acids can be in a solution (e.g., an aqueous solution), and can be subjected to hybridization in solution to polynucleotides from a sample of interest. Methods of solution hybridization are well-known in the art.

[0119] Alternatively, the nucleic acids can be in the form of an array. The term “array” as used herein means an ordered (e.g., geometrically ordered) arrangement of addressable and accessible, spatially discrete and identifiable, molecules disposed on a surface. Arrays, generally described as macroarrays or microarrays, can comprise any number of individual probe sites, from about 5 to, in the case of a “microarray,” as many as about 900 or more probes. Macroarrays contain sample spots of about 300 μm diameter or larger and can be easily imaged by existing gel and blot scanners. Sample spot sizes in microarrays are typically <200 μm in diameter, and these arrays usually contains thousands of spots. Microarrays require specialized robotics and imaging equipment that generally are commercially available and well-known in the art.

[0120] Any suitable, compatible surface can be used in conjunction with this invention. The surface usually a solid, can be made of any of a variety of organic or inorganic materials or combinations thereof, including, for example, a plastic such as polypropylene or polystyrene; a ceramic; silicon; (fused) silica, quartz or glass, which can have the thickness of, for example, a glass microscope slide or a glass cover slip; paper, such as filter paper; diazotized cellulose; nitrocellulose; nylon membrane; or polyacrylamide gel pad. Substrates that are transparent to light are useful when employed with optical detection methods. In one embodiment, the surface is the plastic surface of a multiwell e.g. tissue culture dish, such as a 9k6 (or greater)-well microplate. The shape of the surface is not critical. It can, for example, be a flat square, rectangular, or circular surface; a curved surface; or a three dimensional surface such as a bead, particle, strand, precipitate, tube, sphere; etc. Microfluidic devices are also encompassed by the invention.

[0121] In a preferred embodiment, a composition comprising nucleic acids is in the form of a microarray. Microarrays are orderly arrangements of spatially resolved samples or probes (e.g., cDNAs or oligonucleotides of known sequence, ranging in size from about 15 to about 2000 nucleotides), that allow for massively parallel gene expression analysis (Lockhart D J et al., Nature (2000) 405(6788):827-836). The probes are preferably immobilized to a solid substrate and are available to hybridize with complementary polynucleotide strands (Phimister, Nature Genetics (1999) 21(supp):1-60).

[0122] The underlying concept of array hybridization analysis depends on base-pairing (hybridization) following the rules of Watson-Crick base pairing. Microarray technology adds automation to the process of resolving nucleic acids of particular identity and sequence present in an analyte sample by labeling, preferably with fluorescent labels, and subsequent hybridization to their complements immobilized to a solid support in microarray format.

[0123] The materials for a particular application are not necessarily available in convenient in kit form. The present invention provides arrays, including microarrays, that are useful for the analysis of RCC samples and the determination of the subclass of a renal tumor.

[0124] DNA microarrays (DNA “chips”) are fabricated by high-speed robotics, preferably on glass (though nylon and other plastic substrates are used). An experiment with a single DNA chip can provide simultaneous information on thousands of genes—a dramatic increase in throughput (Reichert et al. (2000) Anal. Chem. 72:6025-6029) when compared to traditional methods.

[0125] Two DNA microarray formats are preferred.
[0126] Format I: a cDNA probe (e.g., 500-5,000 bases) is immobilized to a solid surface such as glass using robotic spotting and exposed to a set of targets either separately or in a mixture. This method is traditionally called “DNA microarray” (Ekins, R et al., Trends in Biotech (1999) 17:217-218).
[0127] Format II: an array of probes that are “natural” oligo- or polynucleotides (oligomers of 20˜80 bases), oligonucleotide analogues e.g., with phosphorothioate, methylphosphonate, phosphoramidate, or 3′-aminopropyl backbones), or peptide-nucleic acids (PNA)
   Probes may be synthesized either in situ (on-chip) or by conventional synthesis followed by on-chip immobilization.

[0128] The array is (1) exposed to an analyte comprising a detectable labeled, preferably fluorescent, sample nucleic acid (typically DNA), (2) allowed to hybridize, and (3) the identity and/or abundance of complementary sequences is determined.

| 1. Probe (cDNA or | 2. Chip | 3. Target | | |
|---|---|---|---|---|
| oligonucleotide of | fabrication (putting | (detectably labeled | | |
| known identity) | probes on the chip) | sample) | 4. Assay | 5. Readout |
| Small oligos, cDNA, | Photolithography, | PolyA-mRNA | Hybridization, long, | Fluorescence, |
| chromosome | pipette, drop-touch, | extraction, RT-PCR, | short, ligase, base | radioactivity, |
| | piezoelectric (ink- | cDNA isolation, | addition, electric, MS, | etc. |
| | j0et), electric | melting | electrophoresis, flow | |
| | | | cytometry, PCR-Direct, | |
| | | | TaqMan ®, etc. | |

[0129] One embodiment of the invention relates to a microarray useful to distinguish among subtypes of RCCs, comprising a matrix of at least one cDNA probe from one or more sets of probes immobilized to a solid surface in predetermined order such that a row of pixels corresponds to replicates of one distinct probe from one of the sets, the probes being any of a set represented by SEQ ID NOs:1-30; a set represented by SEQ ID NOs: 31-60; a set represented by SEQ ID NOs:61-90; a set represented by SEQ ID NOs:91-93; a set represented by SEQ ID NOs: 94-98; and/or a set represented by SEQ ID NOs:99-100,

[0130] wherein the probes in each set are complementary to nucleic acid sequences expressed differentially in different subtypes of renal cell carcinomas (RCC), which nucleic acid sequences hybridize to the probes under high stringency conditions.

[0131] For analysis of the target nucleic acid of primary tumor tissue, the preferred analyte of this invention is isolated from tissue biopsies before they are stored or from fresh-frozen tumor tissue of the primary tumor which may be stored and/or cultured in standard culture media. For expression studies, poly(A)-containing mRNA is isolated using commercially available kits, e.g., from Invitrogen, Oligotex, or Qiagen. The isolated mRNA is assayed directly or, preferably, is reverse transcribed into cDNA in the presence of a labeled nucleotides. Fluorescent cDNA is generally synthesized using reverse transcriptase (e.g., Superscript II reverse-transcription kit from GIBCO-BRL) and nucleotides to which is conjugated a fluorescent label. A preferred fluorescent label is Cy5 conjugated to dUTP and/or dCTP (from Amersham). Additional, optional, methods of amplification of the target, such as by PCR, are also included in the methods of the invention.

[0132] In one embodiment, the present method employs immobilized cDNA probes of anywhere between about 15 bases up to a fall length cDNA, e.g., about 2000 bases. Preferred probes have about 100 bases. Optimal hybridization conditions (temperature, pH, ion and salt concentrations, and incubation time) are dependent on the length of the shortest probes as the limiting step and can be adjusted in a continuous fashion by varying the above parameters as is conventional in the art. In a preferred embodiment, probes of the invention hybridize specifically to target polynucleotides of interest under conditions of high stringency. As used herein, “conditions of high stringency” or “high stringent hybridization conditions” means any conditions in which hybridization will occur when there is at least about 95%, preferably about 97 to 100%, nucleotide complementarity (identity) between the nucleic acids (e.g., a polynucleotide of interest and a nucleic acid probe). However, depending on the desired purpose, hybridization conditions can be selected which require less complementarity, e.g., about 90%, 85%, 75%, 50%, etc. Appropriate hybridization conditions include, e.g., hybridization in a buffer such as, for example, 6×SSPE-T (0.9 M NaCl, 60 mM NaH₂ PO₄, 6 mM EDTA and 0.05% Triton X-100) for between about 10 minutes and about at least 3 hours (in a preferred embodiment, at least about 15 minutes) at a temperature ranging from about 4° C. to about 37° C.

[0133] Several probe sequences described herein are cDNAs complementary to genes or gene fragments; some are ESTs. Those skilled in the art will appreciate that a probe of choice for a particular gene can be the full length coding sequence or any fragment thereof having generally at least about 8 or at least about 15 nucleotides. Thus, when the fall length sequence is known, the practitioner can select any appropriate fragment of that sequence. When the original results are obtained using partial sequence information (e.g., an EST probe), and when the full length sequence of which that EST is a fragment becomes available (e.g., in a genome database), the skilled artisan can select a longer fragment than the initial EST, as long as the length is at least about 8 or at least about 15 nucleotides.

[0134] The arrays of the present invention comprise one or more nucleic acid probes having hybridizable fragments of any length (from about 15 bases to full coding sequence) for the genes whose expression is to be analyzed. For purposes of the analysis, it is not necessary that the full length sequence be known, as those of skill in the art will know how to obtain the full length sequences using the sequence of a given EST and known data mining, bioinformatics, and DNA sequencing methodologies without undue experimentation.

[0135] The nucleic acid probes of the present invention may be native DNA or RNA molecules or analogues of DNA or RNA. The present invention is not limited to the use of any particular DNA or RNA analogue; rather any one is useful provided that it is capable of adequate hybridization to a complementary DNA strand (or mRNA) in a test sample, has adequate resistance to nucleases and stability in the hybridization protocols employed. DNA or RNA may be made more resistant to nuclease degradation in vivo by modifying internucleoside linkages (e.g., methylphosphonates or phosphorothioates) or by incorporating modified nucleosides (e.g., 2′-0-methylribose or 1′-α-anomers) as described below.

[0136] A nucleic acid may comprise at least one modified base moiety, for example, 5-fluorouracil, 5-bromouracil, 5-chlorouracil, 5-iodouracil, hypoxanlthine, xanthine, 4-acetylcytosine, 5-(carboxyhydroxylmethyl)uracil, 5-carboxymethylaminomethyl-ω-thiouridine, 5-carboxymethyl-aminomethyl uracil, dihydrouracil, β-D-galactosylqueosine, inosine, N6-isopentenyladenine, 1-methylguanine, 3-methyl-cytosine, 5-methylcytosine, N6-adenine, 7-methylguanine, 5-methylaminomethyluracil, 5-methoxyamino-methyl-2-thiouracil, β-D-mannosylqueosine, 5-methoxy-carboxymethyluracil, 5-methoxyuracil-2-methylthio-N-6-iso-pentenyladenine, uracil-5-oxyacetic acid, butoxosine, pseudouracil, queuosine, 2-thio-cytosine, 5-methyl-2-thiouracil, 2-thiouracil, 4-thiouracil, 5-methyluracil, uracil-5-oxyacetic acid methylester, uracil-t-oxyacetic acid, 5-methyl-2-thiouracil, 3(3-amino-3-N-2-carboxypropyl) uracil and 2,6-diaminopurine.

[0137] The nucleic acid may comprise at least one modified sugar moiety including, but not limited, to arabinose, 2-fluoroarabinose, xylulose, and hexose.

[0138] In yet another embodiment, the nucleic acid probe comprises a modified phosphate backbone synthesized from a nucleotide having, for example, one of the following structures: a phosphorothioate, a phosphoridothioate, a phosphoramidothioate, a phosphoramidate, a phosphordiimidate, a methylsphosphonate, an alkyl phosphotriester, 3′-aminopropyl and a formacetal or analog thereof.

[0139] In yet another embodiment, the nucleic acid probe is an α-anomeric oligonucleotide which forms specific double-stranded hybrids with complementary RNA in which, contrary to the usual β-units, the strands run parallel to each other (Gautier et al., 1987, Nucl. Acids Res. 15:6625-6641).

[0140] A nucleic acid probe (e.g., an oligonucleotide) may be conjugated to another molecule, e.g., a peptide, a hybridization-triggered cross-linking agent, a hybridization-triggered cleavage agent, etc., all of which are well-known in the art.

[0141] Nucleic acid probes (e.g., oligonucleotides) of this invention may be synthesized by standard methods known in the art for example, by using an automated DNA synthesizer (such as those are commercially available from Biosearch, Applied Biosystems, etc.). As examples, phosphorothioate oligonucleotides may be synthesized by the method of Stein et al., Nucl. Acids Res. (1998) 16:3209, methylphosphonate oligonucleotides can be prepared by use of controlled pore glass polymer supports (Sarin et al., Proc. Natl. Acad. Sci. U.S.A. (1988) 85:7448-7451), etc.

[0142] The invention also relates to probe molecules that are at least about 75% identical to a polynucleotide target of interest, or at least about 80%, 90%, 95% or 99% complementary thereto. Conventional algorithms can be used to determine the percent complementarity, e.g., as described by Lipman and Pearson (Proc. Natl. Acad Sci 80:726-730, 1983) or Martinez/Needleman-Wunsch (Nuci Acid Research 11:4629-4634, 1983).

[0143] Nucleic acids of the invention may be detected by any of a variety of conventional methods. Preferred detectable labels include a radionuclides, fluorescers, fluorogens, a chromophore, a chromogen, a phosphorescer, a chemiluminescer or a bioluminescer. Examples of fluorescers or fluorogens are i fluorescein, rhodamine, dansyl, phycoerythrin, phycocyanin, allophycocyanin, o-phthaldehyde, fluorescamine, a fluorescein derivative, Oregon Green, Rhodamine Green, Rhodol Green or Texas Red.

[0144] Common fluorescent labels include fluorescein, rhodamine, dansyl, phycoerythrin, phycocyanin, allophycocyanin, o-phthaldehyde and fluorescamine. Most preferred are the labels described in the Examples, below.

[0145] The fluorophore must be excited by light of a particular wavelength to fluoresce. See, for example, Haugland, Handbook of Fluorescent Probes and Research Chemicals, Sixth Ed., Molecular Probes, Eugene, Oreg., 1996).

[0146] Fluorescein, fluorescein derivatives and fluorescein-like molecules such as Oregon Green™ and its derivatives, Rhodamine Green™ and Rhodol Green™, are coupled to amine groups using the isothiocyanate, succinimidyl ester or dichlorotriazinyl-reactive groups. Similarly, fluorophores may also be coupled to thiols using maleimide, iodoacetamide, and aziridine-reactive groups. The long wavelength rhodamines, which are basically Rhodamine Green™ derivatives with substituents on the nitrogens, are among the most photostable fluorescent labeling reagents known. Their spectra are not affected by changes in pH between 4 and 10, an important advantage over the fluoresceins for many biological applications. This group includes the tetramethylrhodamines, X-rhodamines and Texas Red™ derivatives. Other preferred fluorophores are those which are excited by ultraviolet light. Examples include cascade blue, coumarin derivatives, naphthalenes (of which dansyl chloride is a member), pyrenes and pyridyloxazole derivatives.

[0147] The present invention serves as a basis for even broader implementation of arrays, such as microarrays, and gene expression in deducing important pathways implicated in the different subtypes of renal cancer. For example, the expression patterns disclosed herein are based on an analysis of about 70 kidney tumors. As additional patient samples are analyzed, larger databases may be generated that provide even more information concerning metabolic differences among the various types of renal cancers. Correlations with other factors, such as clinical outcome, can add even further understanding.

[0148] Other aspects of the invention relate to methods to determine the subtype of an RCC in a subject, comprising detecting the presence of, and/or quantitating the amount of, one or more protein products whose expression is upregulated in a majority of subjects suffering from one of the subtypes of RCC as discussed elsewhere herein. The terms “protein” and “polypeptide” are used interchangeably herein.

[0149] Examples of such proteins are those discussed above as components of protein-containing compositions of the invention. The protein can be, e.g., a secreted protein, an intracellular protein which is rendered accessible by permeabilizing the cell in which it resides, or a cell surface expressed protein. The presence or quantity of the protein product in a body fluid or, preferably, in a tissue or cell sample from the kidney of the subject, is determined. An increased level of the protein product compared to the level in a normal subject's fluid, or in a normal (noncancerous) kidney sample from the subject or from a reference normal value (e.g., from pool of normal subjects), is indicative of the presence of a particular subtype of renal cell carcinoma. Proteins whose overexpression are indicative of particular subtypes of RCC are discussed elsewhere herein.

[0150] Methods of preparing patient samples, such as kidney samples, and detecting and/or quantitating proteins therein are conventional and well known in the art. Some such methods are discussed elsewhere herein.

[0151] In a particularly preferred method, the proteins are detected by immunological methods, such as, e.g., immunoassays (EIA), radioimmunoassay (RIA), immunofluorescence microscopy, or immunohistochemistry, all of which assay methods are fully conventional.

[0152] Any of a variety of antibodies can be used in such methods. Such antibodies include, e.g., polyclonal, monoclonal (imAbs), recombinant, humanized or partially humanized, single chain, Fab, and fragments thereof. The antibodies can be of any isotype, e.g., IgM, various IgG isotypes such as IgG_{1′}IgG₂ₐ, etc., and they can be from any animal species that produces antibodies, including goat, rabbit, mouse, chicken or the like. An antibody “specific for” a polypeptide means that the antibody recognizes a defined sequence of amino acids, or epitope, either present in the full length polypeptide or in a peptide fragment thereof. Antibodies can be prepared according to conventional methods, which are well known. See, e.g., Green et al., Production of Polyclonal Antisera, in Immunochemical Protocols (Manson, ed.), (Humana Press 1992); Coligan et al., in Current Protocols in Immunology, Sec. 2.4.1 (1992); Kohler & Milstein, Nature 256:495 (1975); Coligan et al., sections 2.5.1-2.6.7; and Harlow et al., Antibodies: A Laboratory Manual, page 726 (Cold Spring Harbor Laboratory Pub. 1988). Methods of preparing humanized or partially humanized antibodies, and antibody fragments, and methods of purifying antibodies, are conventional

[0153] Determination of optimal concentrations of antibodies for use in immunohistochemical techniques is accomplished using standard methods, i.e., titrating a test antibody against an appropriate tissue sample. As is known the art, antibody preparations are commonly used at higher concentrations for immunohistochemistry than in EIAs and other such immunoassays.

[0154] The molecular profiling information described herein can also be harnessed for the purpose of discovering drugs that are selected for their ability to correct or bypass the molecular alterations or derangements that are characteristic of the various renal carcinoma sub-types described herein. A number of approaches are available.

[0155] In one embodiment, RCC cell lines are prepared from tumors using standard methods and are profiled using the present methods. Preferred cell lines are those that maintain the expression profile of the primary tumor from which they were derived. One or several RCC cell lines may be used as a “general” panel; alternatively or additionally, cell lines from individual subjects may be prepared and used. These cell lines are used to screen compounds, preferably by high-throughput screening (HTS) methods, for their ability to alter the expression of selected genes. Typically, small molecule libraries available from various commercial sources are tested by HTS protocols.

[0156] The molecular alterations in the cell line cells can be measured at the mRNA level (gene expression) applying the methods disclosed in detail herein. Alternatively, one may assay the protein product(s) of the selected gene(s). Thus, in the case of secreted or cell-surface proteins, expression can be assessed using immunoassay or other immunological methods including enzyme immunoassays (EIA), radioimmunoassay (RIA), immunofluorescence microscopy or flow cytometry. EIAs are described in greater detail in several references (Butler, J E, In: Structure of Antigens, Vol. 1 (Van Regenmortel, M., CRC Press, Boca Raton 1992, pp. 209-259; Butler, J E, “ELISA,” In: van Oss, C. J. et al. (eds), Immunochemistry, Marcel Dekker, Inc., New York, 1994, pp. 759-803; Butler, J E (ed.), Immunochemistry of Solid-Phase Immunoassay, CRC Press, Boca Raton, 1991). RIAs are discussed in Kirkham and Hunter (eds.), Radioimmune Assay Methods, E. & S. Livingstone, Edinburgh, 1970.

[0157] In another approach, antisense RNAs or DNAs that specifically inhibit the transcription and/or translation of the targeted genes can be screened for specificity and efficacy using the present methods. Antisense compositions would be particularly useful for treating tumors in which a particular gene is up-regulated (e.g., the genes in Tables 1, 2, 3, 5 and 6, or the genes identified for Wilms Tumor).

[0158] The protein products of genes that are upregulated in most cases of the renal tumors described herein (Tables 1, 2, 3, 5 and 6, and the two genes identified for Wilms' tumor) are targets for diagnostic assays if the proteins can be detected by some assay means, e.g., immunoassay, in some accessible body fluid or tissue.

[0159] One class of diagnostic targets is secreted proteins which reach a measurable level in a body. Thus, a sample of a body fluid such as such as plasma, serum, urine, saliva, cerebrospinal fluid, etc., is obtained from the subject being screened. The sample is subject to any known assay for the protein analyte. Alternatively, cells expressing the protein on their surface may be obtained, e.g., blood cells, by simple, conventional means. If the protein is a receptor or other cell surface structure, it can be detected and quantified by well-known methods such as flow cytometry, immunofluorescence, immunocytochemistry or immunohistochemistry, and the like.

[0160] In a preferred embodiment, diagnosis is performed on a sample from a kidney tumor, e.g., a biopsy tissue, a fresh-frozen sample, or, in a most preferred embodiment, a section of a paraffin-embedded block of tissue. Methods of preparing all of these sample types are conventional and well known in the art. Biopsy material and fresh-frozen samples can be extracted by conventional procedures to obtain proteins or polypeptides therein. In one embodiment, paraffin-embedded blocks are sectioned and analyzed directly without such extractions. An example showing immunohistochemical analysis of such paraffin blocks is shown in Example 1 and FIG. 3.

[0161] Preferably, an antibody or other protein or peptide ligand for the target protein to be detected is used. In another embodiment where the gene product is a receptor, a peptidic or small molecule ligand for the receptor may be used in known assays as the basis for detection and quantitation.

[0162] In vivo methods with appropriately labeled binding partners for the protein targets, preferably antibodies, may also be used for diagnosis and prognosis, for example to image occult metastatic foci or for other types of in situ evaluations. These methods utilize include various radiographic, scintigraphic and other imaging methods well-known in the art (MRI, PET, etc.).

[0163] Suitable detectable labels include radioactive, fluorescent, fluorogenic, chromogenic, or other chemical labels. Useful radiolabels, which are detected simply by gamma counter, scintillation counter or autoradiography include ³H, ¹²⁵I, ¹³¹I, ³⁵S and ¹⁴C.

[0164] Common fluorescent labels include fluorescein, rhodamine, dansyl, phycoerythrin, phycocyanin, allophycocyanin, o-phthaldehyde and fluorescamine. The fluorophore, such as the dansyl group, must be excited by light of a particular wavelength to fluoresce. See, Haugland, Handbook of Fluorescent Probes and Research Chemicals, Sixth Ed., Molecular Probes, Eugene, Oreg., 1996). Fluorescein, fluorescein derivatives and fluorescein-like molecules such as Oregon Green™ and its derivatives, Rhodamine Green™ and Rhodol Green™, are coupled to amine groups using the isothiocyanate, succinimidyl ester or dichlorotriazinyl-reactive groups. Fluorophores may also be coupled to thiols using maleimide, iodoacetamide, and aziridine-reactive groups. The long wavelength rhodamines include the tetramethylrhodamines, X-rhodamines and Texas Red™ derivatives. Other preferred fluorophores for derivatizing the protein binding partner are those which are excited by ultraviolet light. Examples include cascade blue, coumarin derivatives, naphthalenes (of which dansyl chloride is a member), pyrenes and pyridyloxazole derivatives.

[0165] The protein (antibody or other ligand) can also be labeled for detection using fluorescence-emitting metals such as ¹⁵²Eu, or others of the lanthanide series. These metals can be attached to the protein using metal chelating groups such as diethylenetriaminepentaacetic acid (DTPA) or ethylenediaminetetraacetic acid (EDTA).

[0166] For in vivo diagnosis, radionuclides may be bound to protein either directly or indirectly using a chelating agent such as DTPA and EDTA which is chemically conjugated, coupled or bound (which terms are used interchangeably) to the protein. The chemistry of chelation is well known in the art. The key limiting factor on the chemistry of coupling is that the antibody or ligand must retain its ability to bind the target protein. A number of references disclose methods and compositions for complexing metals to macromolecules including description of useful chelating agents. The metals are preferably detectable metal atoms, including radionuclides, and are complexed to proteins and other molecules. See, for example, U.S. Pat. Nos. 5,627,286, 5,618,513, 5,567,408, 5,443,816 and 5,561,220, all of which are incorporated by reference herein.

[0167] Any radionuclide having diagnostic (or therapeutic value) can be used. In a preferred embodiment, the radionuclide is a γ-emitting or β-emitting radionuclide, for example, one selected from the lanthanide or actinide series of the elements. Positron-emitting radionuclides, e.g. ⁶⁸Ga or ⁶⁴Cu, may also be used. Suitable β-emitting radionuclides include those which are useful in diagnostic imaging applications. The gamma-emitting radionuclides preferably have a half-life of from 1 hour to 40 days, preferably from 12 hours to 3 days. Examples of suitable γ-emitting radionuclides include ⁶⁷Ga, ¹¹¹In, ^{99m}Tc, ¹⁶⁹Yb and ¹⁸⁶Re. Examples of preferred radionuclides (ordered by atomic number) are ⁶⁷Cu, ⁶⁷Ga, ⁶⁸Ga, ⁷²As, ⁸⁹Zr, ⁹⁰Y, ⁹⁷Ru, ⁹⁹Tc, 111In, ¹²³I, ¹²⁵I, ¹³¹I, ¹⁶⁹Yb, ¹⁸⁶Re, and ²⁰¹Tl. Though limited work have been done with positron-emitting radiometals as labels, certain proteins, such as transferrin and human serum albumin, have been labeled with ⁶⁸Ga,

[0168] A number of metals (not radioisotopes) useful for MRI include gadolinium, manganese, copper, iron, gold and europium. Gadolinium is most preferred. Dosage can vary from 0.01 mg/kg to 100 mg/kg.

[0169] In situ detection of the labeled protein may be accomplished by removing a histological specimen from a subject and examining it by microscopy under appropriate conditions to detect the label. Those of ordinary skill will readily perceive that any of a wide variety of histological methods (such as staining procedures) can be modified in order to achieve such in situ detection.

[0170] The compositions of the present invention may be used in diagnostic, prognostic or research procedures in conjunction with any appropriate cell, tissue, organ or biological sample of the desired animal species. By the term “biological sample” is intended any fluid or other material derived from the body of a normal or diseased subject, such as blood, serum, plasma, lymph, urine, saliva, tears, cerebrospinal fluid, milk, amniotic fluid, bile, ascites fluid, pus and the like. Also included within the meaning of this term is a organ or tissue extract and a culture fluid in which any cells or tissue preparation from the subject has been incubated. Samples from renal tissue are preferred.

[0171] An alternative diagnostic approach utilizes cDNA probes that are complementary to and thereby detect cells in which a gene associated with a subtype of RCC is upregulated by in situ hybridization with mRNA in these cells. The present invention provides methods for localizing target mRNA in cells using fluorescent in situ hybridization (FISH) with labeled cDNA probes having a sequence that hybridizes with the mRNA of an upregulated gene. The basic principle of FISH is that DNA or RNA in the prepared specimens are hybridized with the probe nucleic acid that is labeled non-isotopically with, for example, a fluorescent dye, biotin or digoxigenin. The hybridized signals are then detected by fluorimetric or by enzymatic methods, for example, by using a fluorescence or light microscope. The detected signal and image can be recorded on light sensitive film.

[0172] An advantage of using a fluorescent probe is that the hybridized image can be readily analyzed using a powerful confocal microscope or an appropriate image analysis system with a charge-coupled device (CCD) camera. As compared with radioactive methods, FISH offers increased sensitivity. In additional to offering positional information, FISH allows better observation of cell or tissue morphology. Because of the nonradioactive approach, FISH has become widely used for localization of specific DNA or mRNA in a specific cell or tissue type.

[0173] The in situ hybridization methods and the preparations useful herein are describe in Wu, W. et al., eds., Methods in Gene Biotechnology, CRC Press, 1997, chapter 13, pages 279-289. This book is incorporated by reference in its entirety, as are the references cited therein. A number of patents and papers that describe various in situ hybridization techniques and applications, also incorporated by reference, are: U.S. Pat. Nos. 5,912,165; 5,906,919; 5,885,531; 5,880,473; 5,871,932; 5,856,097; 5,837,443; 5,817,462; 5,784,162; 5,783,387; 5,750,340; 5,759,781; 5,707,797; 5,677,130; 5,665,540; 5,571,673; 5,565,322; 5,545,524; 5,538,869; 5,501,954, 5,225,326, and 4,888,278. Other related references include Jowett, T, Methods Cell Biol; 59:63-85 (1999) Pinkel et al., Cold Spring Harbor Symp. Quant. Biol. LI:151-157 (1986); Pinkel, D. et al., Proc. Natl. Acad. Sci. (USA) 83:2934-2938 (1986); Gibson et al., Nucl. Acids Res. 15:6455-6467 (1987); Urdea et al., Nucl. Acids Res. 16:4937-4956 (1988); Cook et al., Nucl. Acids Res. 16:4077-4095 (1988); Telser et al., J. Am. Chem. Soc. 111:6966-6976 (1989); Allen et al., Biochemistry 28:4601-4607 (1989); Nederlof, P. M. et al., Cytometry 10:20-27 (1989); Nederlof, P. M. et al., Cytometry 11:126-131 (1990); Seibl, R., et al., Biol. Chem. Hoppe-Seyler 371:939-951 (October 1990); Wiegant, J. et al., Nucl. Acids Res. 19:3237-3241 (1991); McNeil J A et al., Genet Anal Tech Appl 8:41-58 (1991); Komminoth et al., Diagnostic Molecular Biology 1:85-87 (1992); Dauwerse, J G et al., Hum. Mol. Genet. 1:593-598 (1992); Ried, T. et al., Proc. Natl. Acad. Sci. (USA) 89:1388-1392 (1992); Wiegant, J. et al., Cytogenet. Cell Genet. 63:73-76 (1993); Glaser, V., Genetic. Eng. News. 16:1, 26 (1996); Speicher, M R, Nature Genet. 12:368-375 (1996).

[0174] In a case in which an upregulated gene, e.g., DNA sequence “X” is identified but its protein product “Y” is unknown, one would first examine the expressed DNA sequence X. The full length gene sequence may be obtained by accessing a human genomic database such as that of Celera. In either case, examination of the coding sequence for appropriate motifs will indicate whether the encoded protein Y is secreted protein or a transmembrane protein. If no antibodies specific for protein Y are already available, peptides of protein Y can be designed and synthesized using known principles of protein chemistry and immunology. The object is to create a set of immunogenic peptides that elicit antibodies specific for surface epitopes of the protein. Alternatively, the coding DNA or portions thereof can be expression-cloned to produce a polypeptide or a peptide thereof. That protein or peptide can be used as an immunogen to immunize animals for the production of antisera or to prepare mAbs. These polyclonal sera or mAbs can then be applied in an immunoassay, preferably an EIA, to detect the presence of protein Y or measure its concentration in a body fluid or cell/tissue sample.

[0175] Taking the lead from the drug discovery methods described above, one can exploit the present invention to treat kidney tumors based on the knowledge of the genes that are upregulated in a highly predicable manner in any particular renal tumor subtype. (see Tables 1-3, 5, and 6). Based on the nature of the deduced protein product, one can devise a means to inhibit the action of, or bind, block, remove or otherwise diminish the presence and availability of the upregulated protein. In the case of a cellular receptor, one would expose the upregulated receptor to an antagonist, a soluble form of the receptor or a “decoy” ligand binding site of a receptor (to compete for ligand) (Gershoni J M et al., Proc Natl Acad Sci USA, 1988, 85:4087-9; U.S. Pat. No. 5,770,572).

[0176] Antibodies may be administered to a subject to bind and inactivate (or compete with) secreted protein products or expressed cell-surface products of upregulated genes.

[0177] Another therapeutic approach is to employ antisense oligonucleotide or polynucleotide constructs that inhibit gene expression of an upregulated gene in a highly specific manner. Methods to select, test and optimize putative antisense sequences are routine, as are methods to operatively link appropriate antisense sequences to an appropriate regulatory element, e.g., a promoter, such as a strong promoter, an inducible strong promoter, or the like. Inducible promoters include, e.g., an estrogen inducible system (Braselmann, S. et al Proc Natl Acad Sci USA (1993) 90:1657-1661). Also known are repressible systems driven by the conventional antibiotic, tetracycline (Gossen, M. et al., Proc. Natl. Acad. Sci. USA 89:5547-5551 (1992)). Multiple antisense constructs specific for different upregulated genes can be employed together. The sequences of the upregulated genes described herein can be used to design the antisense oligonucleotides (Hambor, J E et al., J. Exp. Med. 168:1237-1245 (1988); Holt, J T et al., Proc. Nat'l. Acad. Sci. 83:4794-4798 (1986); Izant, J G et al., Cell 36:1007-1015 (1984); Izant, J G et al, Science 229:345-352 (1985); De Benedetti, A. et al, Proc. Natl. Acad. Sci. USA, 84:658-662 (1987)). The antisense oligonucleotides may range from about 6 to about 50 nucleotides, and may be as large as 100 or 200 nucleotides, or larger. The oligonucleotides can be DNA or RNA or chimeric mixtures or derivatives or modified versions thereof, single-stranded or double-stranded. The oligonucleotides can be modified at the base moiety, sugar moiety, or phosphate backbone (as discussed above). The oligonucleotide may include other appending groups such as peptides, or agents facilitating transport across the cell membrane (see, e.g. Letsinger et al., 1989, Proc. Natl. Acad. Sci. USA 84:684-652; PCT Publication WO 88/09810 (1988) or blood-brain barrier (e.g., PCT Publication WO 89/10134 (1988), hybridization-triggered cleavage agents (e.g. Krol et al, 1988, BioTechniques 6:958-976) or intercalating agents (e.g., Zon, 1988, Pharm. Res 5:539-549). Other therapeutic methods, such as the use of ribozymes that can specifically cleave nucleic acids encoding the overexpressed genes of the invention are also contemplated by the invention. Such methods are routine in the art and methods of making and using any of a variety of appropriate ribozymes are well known to the skilled worker.

[0178] Another therapeutic approach involves double stranded RNAs called small interfering RNA (RNAi). RNAi molecules can be used to inhibit gene expression, using conventional procedures. Typical methods to make and use interfering RNA molecules are described, e.g., in U.S. Pat. No. 6,506,559.

[0179] Methods of gene transfer can be used, wherein oligonucleotides such antisense molecules or ribozymes are introduced into a renal tumor cell or tissue or other tissue or organ of interest, or nucleic acids that encode proteins which interfere with the production or activity of one or more of the overexpressed genes of the invention are so introduced. Therapeutic methods that require gene transfer and targeting may include virus-mediated gene transfer, for example, with retroviruses (Nabel, E. G. et al., Science 244:1342 (1989), lentiviruses, recombinant adenovirus vectors (Horowitz, M. S., In: Virology, Fields, B N et al., eds, Raven Press, New York, 1990, p. 1679, or current edition; Berkner, K L, Biotechniques 6:616 919, 1988), Strauss, SE, In: The Adenoviruses, Ginsberg, HS, ed., Plenum Press, New York, 1984, or current edition), Adeno-associated virus (AAV) is also useful for human gene therapy (Samulski, R J et al., EMBO J. 10:3941 (1991); (Lebkowski, J S, et al., Mol. Cell. Biol. (1988) 8:3988-3996; Kotin, R M et al., Proc. Natl. Acad. Sci. USA (1990) 87:2211-2215); Hermonat, P L, et al., J. Virol. (1984) 51:329-339). Improved efficiency is attained by the use of promoter enhancer elements in the plasmid DNA constructs (Philip, R. et al, J. Biol. Chem. (1993) 268:16087-16090).

[0180] In addition to virus-mediated gene transfer in vivo, physical means well-known in the art can be used for direct gene transfer, including administration of plasmid DNA (Wolff et al., 1990, supra) and particle-bombardment mediated gene transfer, originally described in the transformation of plant tissue (Klein, T M et al., Nature 327:70 (1987); Christou, P. et al., Trends Biotechnol. 6:145 (1990)) but also applicable to mammalian tissues in vivo, exk vivo or in vitro (Yang, N.-S., et al., Proc. Natl. Acad. Sci. USA 87:9568 (1990); Williams, R S et al., Proc. Natl. Acad. Sci. USA 88:2726 (1991); Zelenin, A V et al., FEBS Lett. 280:94 (1991); Zelenin, A V et al., FEBS Lett. 244:65 (1989); Johnston, S. A. et al., In Vitro Cell. Dev. Biol. 27:11 (1991)). Furthermore, electroporation, a well-known means to transfer genes into cell in vitro, can be used to transfer DNA molecules according to the present invention to tissues in vivo (Titomirov, A V et al., Biochim. Biophys. Acta 1088:131 ((1991)).

[0181] Gene transfer can also be achieved using “carrier mediated gene transfer” (Wu, C H et al., J. Biol. Chem. 264:16985 (1989); Wu, G Y et al., J. Biol. Chem. 263:14621 (1988); Soriano, P et al., Proc. Natl. Acad. Sci. USA 80:7128 (1983); Wang, C-Y. et al., Proc. Natl. Acad. Sci. USA 84:7851 (1982); Wilson, J. M. et al., J. Biol. Chem. 267:963 (1992)). Preferred carriers are targeted liposomes (Nicolau, C. et al., Proc. Natl. Acad. Sci. USA 80:1068 (1983); Soriano et al., supra) such as immunoliposomes, which can incorporate acylated monoclonal antibodies into the lipid bilayer (Wang et al., supra), or polycations such as asialoglycoprotein/polylysine (Wu et al., 1989, supra). Liposomes have been used to encapsulate and deliver a variety of materials to cells, including nucleic acids and viral particles (Faller, D V et al., J. Virol. (1984) 49:269-272).

[0182] Preformed liposomes that contain synthetic cationic lipids form stable complexes with polyanionic DNA (Felgner, P L, et al., Proc. Natl. Acad. Sci. USA (1987) 84:7413-7417). Cationic liposomes, liposomes comprising some cationic lipid, that contained a membrane fusion-promoting lipid dioctadecyldimethyl-ammonium-bromide (DDAB) have efficiently transferred heterologous genes into eukaryotic cells (Rose, J K et al., Biotechniques (1991) 10:520-525). Cationic liposomes can mediate high level cellular expression of transgenes, or mRNA, by delivering them into a variety of cultured cell lines (Malone, R, et al., Proc. Natl. Acad. Sci. USA (1989) 86:6077-6081).

[0183] One can also exploit the present invention to monitor the treatment of kidney tumors, based on the knowledge of the genes that are upregulated in a highly predicable manner in any particular renal tumor subtype. At various stages during the course of the treatment of a subject, renal samples may be taken and prepared for analysis, as described elsewhere herein, and analyzed for the presence and/or amount of one or more the upregulated genes whose overexpression correlates with the type of renal tumor being treated, compared to the amount in a normal renal tissue. Successful treatment will be reflected by a change in the expression pattern to one more closely resembling that of a normal renal tissue.

[0184] The present invention also relates to combinations of nucleic acids or polypeptides of the invention represented, not by physical molecules, but by computer-implemented databases that list or otherwise include or represent these sequences, etc. For example, the present invention includes electronic forms of information representing the polynucleotides, polypeptides, etc., of the present invention, including the computer-readable medium (e.g., magnetic, optical, etc.) on which this information is stored in any suitable format, such as flat files or hierarchical files. This information preferably comprises full length or partial sequences and e-commerce-type means for manipulating, retrieving, and sharing the information, etc. For example, an investigator may compare an expression profile exhibited by a renal carcinoma sample of interest to data in an electronic or other computer-readable form that describes or represents a compositions of the invention, and may thereby determine the subtype of the renal tumors being evaluated.

[0185] Having now generally described the invention, the same will be more readily understood through reference to the following examples which are provided by way of illustration, and are not intended to be limiting of the present invention, unless specified.

### EXAMPLE I

Subjects and Tumor Samples

[0186] A total of 69 frozen primary kidney tumors (39 clear cell RCC, 7 papillary RCC, 6 granular RCC, 5 chromophobe RCC, 2 sarcomatoid RCC, 2 oncocytomas, 3 TCCs, and 5 Wilms' tumors), 1 metastatic papillary RCC and matched or unmatched noncancerous kidney tissue were obtained from the University of Tokushima, the University of Chicago, Spectrum Health Urologic Group and Cooperative Human Tissue Network (CHTN). All tissues were accompanied by pathology reports with or without clinical outcome information. The samples were anonymized prior to the study. Part of each tumor sample was frozen in liquid nitrogen immediately after surgery and stored at −80° C.

[0187] Conventional methods were used for nucleic acid isolation and preparation. Total RNA was isolated from the frozen tissues using ISOGEN solution (Nippon Gene, Toyama, Japan) or Trizol reagent (Invitrogen, Carlsbad, Calif.). For the first 45 samples, poly(A)+ RNA was isolated from the total RNA using the Oligotex mRNA Mini Kit (Qiagen, Valencia, Calif.). For the remaining 25 samples, total RNA was purified with 2.5 M final concentration of LiCl. The WHO International Histological Classification of Tumors was used for histological evaluation of the specimens (Mostfi, 1998 supra). UICC (Union Internationale Contre le Cancer) TNM classification and stage groupings were used (Sobin et al., editors, International Union Against Cancer. 5^{th} edition. New York: John Wiley & Sons, 1997).

### EXAMPLE II

### Materials and Methods

Microarray Design and Procedures

[0188] Microarrays were produced using conventional methods and materials well known in the art (Hegde et al., Biotechniques 2000; 29:548-556; Eisen et al., Methods Enzymol (1999) 303:179-205) with slight modifications. Bacterial libraries purchased from Research Genetics, Inc. were the source of 19,968 cDNAs which were PCR amplified directly. cDNA clones were ethanol-precipitated and transferred to 384-well plates from which they were printed onto aminosilane coated glass slides using a home-built robotic microarrayer (see, e.g., the web site at microarrays.org/pdfs/PrintingArrays. Slides were chemically blocked using succinic anhydrate after UV crosslinking. When available, cancers were hybridized against patient matched non-cancerous kidney tissue. For tumors without their matched noncancerous kidney tissue available, RNA from five noncancerous kidney tissues was mixed and pooled for serving as a common reference. For the first 45 samples, two μg of poly(A)+ RNA from tumors and reference were reverse transcribed with oligo (dT) primer and Superscript II (Invitrogen, Carlsbad, Calif.) in the presence of Cy5-dCTP and Cy3-dCTP (Amershamn Pharmacia Biotech, Peapack, N.J.). For the remaining 25 samples, 50 μg of total RNA from tumors and reference were used for reverse transcription. The Cy5- and Cy3-labeled cDNA probes were mixed with probe hybridization solution containing formamide and hybridized to pre-warmed (50° C.) slides for 20 hours at 50° C. Following hybridization, slides were washed in 1×SSC, 0.1% SDS at 50° C. for 5 minutes followed by 0.2×SSC, 0.1% SDS at room temperature (RT) for 5 minutes, 0.2×SSC at RT for 5 minutes twice, and 0.1×SSC at RT for 5 minutes. Slides were dried immediately by centrifugation and scanned using a Scan Array Lite scanner at 532 nm and 635 nm wavelengths (GSI Lumonics, Billerica, Calif.).

Data Analysis

[0189] Images were analyzed using the software Genepix Pro 3.0 (Axon, Union City, Calif.). The local background was subtracted for all spots. Spots whose background-subtracted intensities in either Cy5 or Cy3 channel were less than 150 were excluded from the analysis. The ratio of Cy5 intensity to Cy3 intensity was calculated for each spot, representing tumor RNA expression relative to noncancerous kidney tissue. Ratios were log transformed (base 2) and normalized so that the median log-transformed ratio equaled zero. Genes with the following criteria (3560 genes in total) were selected for the global clustering analysis: 1) expression values present in at least 70% of the tumors; 2) expression ratios that varied at least two-fold in at least two tumors; and 3) maximum ratio minus minimum ratio values greater than two-fold. The gene expression ratios were median polished across all samples. Gene expression values were manipulated and visualized using the CLUSTER and TREEVIEW software (M. B. Eisen, available at the website having the URL rana.lbl.gov). The correlation distances were calculated as 1-r, where r indicates the Pearson rank correlation coefficient (Eisen et al., Proc Natl Acad Sci USA 1998, 95:14863-14868).

[0190] The in-house software program, CIT, was used to find genes that were differentially expressed (using a student's t-test) between one histological subtype and the others (Rhodes et al., Bioinformatics 2002, 18:205-206). To find significant discriminating genes, 10,000 t-statistics were calculated by randomly placing patients into two groups (Hedenfalk et al., 2001, supra). A 99.9% significance threshold (p<0.01) was used to identify genes that could significantly distinguish between two patient groups versus the random patient groupings.

[0191] The clustering analysis of the 70 kidney tumors was displayed as follows: The clustering of patients (using Pearson's correlation) was based on global gene expression profiles consisting of median polished data of 3,560 selected spots. Rows represented individual cDNAs and columns represented individual tumor samples. The color of each square represented the median-polished, normalized ratio of gene expression in a tumor relative to reference. Expression levels greater than the median were indicated with different colors. The color saturation indicated the degree of divergence from the median. The tumors clustered into two broad groups with one group consisting of primarily clear cell RCC and the other consisting of all other kidney tumors. Five chromophobe RCC and two oncocytoma were clustered close together. Each group of eight papillary RCC, five Wilms tumors, or three TCC was clustered together. A set of the most highly expressed genes in each subtype of tumors compared to all other types of kidney tumors studied was identified.

[0192] The data were also displayed as three-dimensional (3D) tumor images. Various subtypes of kidney tumor were each represented by different colors. Five chromophobe RCC and two oncocytoma clustered close together. The eight papillary RCC, five Wilms tumors, and three TCC clustered close together respectively. Clear cell RCC on the other hand looked more scattered than in 2D clustering by TreeView. All tumors with a focus on CC-RCC whose outcome data were available were displayed. Patients who survived more than five years after surgery, and patients who died of cancer within five years after surgery, were represented by different colors.

Immunohistochemistry

[0193] Fifty renal tissue samples, both benign (n—10) and neoplastic (n=40) were analyzed using immunohistochemistry. Kidney tumors included clear cell RCC (n=10), papillary RCC (n=10), chromophobe RCC (n=10), oncocytoma (n-5) and TCC (n=5). A section from each tissue sample was stained with hematoxylin and eosin to verify histology. Antibodies to the following proteins were obtained commercially: GSTα, a methylacyl racemate (Corixa, Seattle, Wash., USA), carbonic anhydrase II and keratin 19 (Dako, Carpinteria, Calif., USA). Standard biotin-avidin-complex immunohistochemistry was performed. Briefly, tissue sections were incubated with primary antibodies for 30 min. at 20° C. Then, the slides were incubated with biotinylated anti-mouse IgG or anti-rabbit IgG (Vector Laboratories, Burlingame, Calif.) at 27° C. for 30 min and the antigen-antibody complex was detected with avidin-biotinylated horseradish peroxidase system (Vector, Burlingame, Calif., USA) using diaminobenzidine (DAB) as a chromogen and hematoxylin as a counterstain. Slides were evaluated as either negative or positive by an expert urologic pathologist.

[0194] Displayed were hematoxylin and eosin-stain and immunostaining for glutathione S-transferase-α (GST-α, F-H). A methylacyl racemase, carbonic anhydrase II (CAII), was demonstrated in normal renal cortex, clear cell RCC, papillary RCC and chromophobe RCC. Strong immunoreactivity was present in renal proximal and distal tubules, GST-α in clear cell RCC, AMACR in papillary RCC and CA H in chromophobe RCC.

### EXAMPLE III

### Classification of Kidney Tumors by Hierarchical Clustering

[0195] Hierarchical clustering (Eisen et al., supra) was used to classify kidney tumors based on their gene expression profiles using the expression ratios of a selected 3,560 cDNA set, as discussed in Example II. The clustering algorithm groups both genes and tumors by similarity in expression pattern. The patient dendrogram, which is based on expression profile of all 3,560 cDNAs is shown in FIG. 1. The gene expression pattern below the dendrogram was based on 1,309 genes that were statistically differentially expressed in each subtype compared to all other types of tumors. Two broad clusters emerged: one consisting of 35 clear cell RCC and 4 granular RCC, and the other all other types of kidney tumors plus 4 clear cell RCC. Five chromophobe RCC and 2 oncocytoma clustered together. The other clusters include 8 papillary RCC, 5 Wilms tumors, and 3 TCC. In the large cluster of clear cell RCC, there are two sub-clusters: one including all patients (except one) who died of cancer (E, FIG. 1) and the other the survivors of cancer without evidence of metastasis (D, FIG. 1). Two clear cell RCC, one primary tumor and a metastasized lymph node from the same patient were also examined (clear cell 40P, 40M). Interestingly, these two samples from the same patient had similar expression pattern, pointing to the genealogical relationship between the primary and metastatic tumor (Haddad 2002). A set of more highly expressed genes in each subtype of tumors compared to all other types of kidney tumors studied is indicated by side bars with different colors on the right-hand side of FIG. 1 (A: chromophobe RCC, B: papillary RCC, C: Wilms tumors, D: clear cell RCC with good outcome, E: clear cell RCC). Six granular cell RCC were located in a seemingly “random” fashion, suggesting it may not be a single entity. The diagnoses of these 6 cases were made in Japan prior to the recommendation of the work group of UICC and AJCC for RCC diagnosis. A blinded histological reevaluation was performed on 5 available cases by an expert urologic pathologist. “Granular RCC 1, 3 and 4”, which were clustered in clear cell RCC group, were re-classified as clear cell RCC. “Granular 2”, which was closely clustered with chromophobe RCC and oncocytomas, was re-classified as a chromophobe RCC. “Granular 5”, which has distinct histology, was not clustered with any RCC group by gene expression profile, may represent a novel subtype of RCC. These findings demonstrated the accuracy, objectivity and potential clinical utility of subclassifying kidney neoplasms by gene expression.

[0196] Multidimensional scaling (MDS) was then used to visualize the relationship among the profiles of all tumors. Three-dimensional (3D) visualization of the MDS data demonstrated how each RCC subtype clustered, e.g., chromophobe RCC/oncocytoma, papillary RCC, Wilms tumors, and TCC (FIG. 2A). “Granular 5”, which was of aggressive type and could not be re-classified, was placed next to the sarcomatoid RCC. Finally, the large majority of CC-RCC with poor outcome clustered to one side suggesting that they shared similar expression profiles (FIG. 2B).

### EXAMPLE IV

### Differentially Expressed Genes in Six Subtypes of Kidney Tumors

[0197] The global clustering analysis shown in Example III, using 3,560 cDNAs, showed that each of six subtypes of kidney tumors had distinct molecular signatures. In the present example, the differentially expressed genes contributing to these distinctions are identified.

CC RCC

[0198] Table 1 shows about 30 genes that are more highly expressed in clear cell RCC than in the other types of kidney tumors studied herein. The following are some overexpressed genes:

[0199] Peroxisome pioliferator-activated receptor gamma angiopoietin-related (PGAR), which was the most differentially expressed gene in CC-RCC (18.3 fold overexpression). Peroxisome proliferator-activated receptor-gamma (PPARγ) regulates adipose differentiation and systemic insulin signaling. PGAR has been found to be a target gene of PPARγ and the expression of PGAR is predominantly localized to adipose tissues and placenta. Also, it has been shown that hormone-dependent adipocyte differentiation occurs with early induction of the PGAR transcript (Yoon et al., Mol Cell Biol 2000; 20:5343-5349). The overexpression of this gene and the gene encoding adipose differentiation-related protein specific to clear cell RCC may be related to the abundance of cholesterol, cholesterol ester, and phospholipids in the cytoplasm of these cells. (Gonzalez et al., Invest Urol 1981; 19:1-3).

[0200] Vascular endothelial growth factor (VEGF) is shown to be highly expressed in CC-RCC and not in other RCC subtypes.

[0201] Glutathione S-transferase (GST)-α functions to protect the cell by catalyzing the detoxification of xenobiotics and carcinogens. Previous immunohistochemical studies have demonstrated strong expression in normal kidney, especially in the proximal tubules as well as in kidney cancer. We demonstrate here that its expression is specific in clear cell RCC and can be used as a marker in differentiating from other RCC subtypes. This is further confirmed by immunohistochemical staining (See, e.g., FIG. 3 and Table 4)

[0202] Five preferred genes whose increased expression is indicative of CC-RCC have been described above.

Papillary RCC

[0203] Table 2 shows about 30 genes that are more highly expressed in papillary RCC than in the other types of kidney tumors studied herein. Among the overexpressed genes are:

[0204] α-methylacyl coenzyme A racemase (AMACR). The enzyme encoded by the α-methylacyl coenzyme A racemase (AMACR) gene plays a critical role in peroxisomal P oxidation of branched chain fatty acid molecules. AMACR has been recently shown over-expressed in prostate cancer at both the transcript level by microarray experiments and the protein level (Rubin et al., JAMA 2002; 287(13):1662-70; Luo et al., Cancer Res 2002; 62(8):2220-6). Further studies by immunohistochemistry have demonstrated the elevation of AMACR protein in more than 90% of prostate cancer cases but not in benign prostatic tissues, suggesting that AMACR maybe a more specific marker than prostate specific antigen (PSA) for prostate cancer (Rubin, 2002, supra; Luo, 2002, supra). This gene was 5.3 times more highly expressed in papillary RCC. In addition, immunohistochemical analysis demonstrated immunoreactivity in 100% of papillary RCC cases, and less than 10% of other subtypes of RCC. (FIG. 3E-H).

TABLE 1
Relatively more highly expressed genes in clear cell RCC

| | NT SEQ | AA SEQ | | Fold | |
|---|---|---|---|---|---|
| Accession ID | ID NO: | ID NO: | Gene name | change | P Value |
| T54298 | 1 | 196 | PPAR (γ) angiopoietin related protein (PGAR) | 18.3 | 0.0001 |
| H95633 | 2 | 197 | crystallin, α A | 16.5 | 0.0001 |
| T73468 | 3 | 198 | glutathione S-transferase A2 | 11.4 | 0.0001 |
| N59772 | 4 | | ESTs- | 9.9 | 0.0001 |
| AA664406 | 5 | 199, 200 | complement component 4A | 9.7 | 0.0001 |
| AA668470 | 6 | 201 | regulator of G-protein signalling 5 | 8.8 | 0.0001 |
| AA169469 | 7 | 202 | pyruvate dehydrogenase kinase, isoenzyme 4 | 8.4 | 0.0001 |
| AA700054 | 8 | 203 | adipose differentiation-related protein | 8.0 | 0.0001 |
| H18608 | 9 | 204 | ESTs, Highly similar to organic anion transporter 3 | 7.9 | 0.0001 |
| AA150532 | 10 | 205 | keratin 6A | 7.6 | 0.0001 |
| H09076 | 11 | 206 | cytochrome P450, subfamily IIJ polypeptide 2 | 7.4 | 0.0001 |
| AA136707 | 12 | 207 | procollagen-lysine, 2-oxoglutarate 5-dioxygenase 2 | 7.2 | 0.0001 |
| W72294 | 13 | 208 | small inducible cytokine subfamily B, member 14 | 7.1 | 0.0001 |
| N30096 | 14 | 209 | glutathione S-transferase A3 | 6.6 | 0.0002 |
| AA454159 | 15 | 210 | H. sapiens HRBPiso mRNA, complete cds | 6.4 | 0.0001 |
| AA017544 | 16 | 211 | regulator of G-protein signalling 1 | 6.3 | 0.0001 |
| AA102107 | 17 | 212 | glutamyl aminopeptidase (aminopeptidase A) | 6.3 | 0.0001 |
| AA4880k70 | 18 | | immunoglobulin κ constant- | 6.2 | 0.0002 |
| N92646 | 19 | | colony stimulating factor 2 receptor, α, low-affinity- | 6.2 | 0.0001 |
| N93191 | 20 | | H. sapiens cDNA: FLJ22811 fis, clone KAIA2944 - | 6.1 | 0.0001 |
| R50354 | 21 | 213 | leukemia inhibitory factor (cholinergic differentiation | 5.9 | 0.0001 |
| | | | factor) | | |
| AA432292 | 2k2 | 214 | hypothetical protein DKFZp434F0318 | 5.8 | 0.0001 |
| T67053 | 23 | | immunoglobulin λ locus - | 5.7 | 0.0001 |
| AA486082 | 24 | 215 | serum/glucocorticoid regulated kinase | 5.6 | 0.0001 |
| AA598601 | 25 | | insulin-like growth factor binding protein 3 - | 5.6 | 0.0001 |
| N58170 | 26 | 216 | kidney- and liver-specific gene | 5.6 | 0.0002 |
| H15366 | 27 | | ESTs- | 5.3 | 0.0001 |
| H88329 | 28 | 217 | calbindin 1, (28 kD) | 5.2 | 0.0001 |
| H38650 | 29 | 218 | solute carrier family 2, member 5 | 5.1 | 0.0001 |
| R45059 | 30 | 219, 220 | vascular endothelial growth factor (VEGF) | 5.1 | 0.0001 |

The top 30 differentially expressed cDNAs in clear cell RCC are listed. They are significantly more highly expressed in clear cell RCC compared to all other types of kidney tumors studied by 10,000 times of permutation test. Fold change indicates clear cell RCC have relatively higher expression of this fold change compared to all other types of kidney tumors studied.

[0205] Guanine deaminase (GDA) is a DNA turnover enzyme and the gene encoding GDA was the most differentially expressed gene in papillary RCC. GDA activity has been found elevated in RCC (Durak et al., Cancer Invest 1997; 15(3):212-6) and gastric cancer (Durak et al., supra). GDA may be a useful marker for papillary RCC.

[0206] Another gene that is over-expressed in papillary RCC is Claudin-4, which is a member of a larger family of transmembrane tissue-specific claudin proteins that are essential components of intercellular tight junction structures. The gene is also over-expressed in prostate cancer (Long, et al., Cancer Res 2001; 61(21):7878-81) and pancreatic cancer (Michl et al., Gastroenterology 2001; 121(3):678-84). Two human dihydrodiol dehydrogenases, which are aldo-keto reductase family 1, member C1 (AKR1C1) and C3 (AK1RC3), were also highly expressed in papillary RCC. Both have been shown over-expressed in human prostate and mammary gland (Penning et al., Mol Cell Endocrinol 2001, 171: 137-149) and in non-small cell lung carcinoma (Hsu et al., Cancer Res 2001, 61:2727-2731) but have not been reported previously in papillary RCC.

[0207] Five preferred genes whose increased expression is indicative of papillary CC-RCC have been described above.

TABLE 2
Relatively more highly expressed genes in papillary RCC

| | NT SEQ | AA SEQ | | Fold | |
|---|---|---|---|---|---|
| Accession ID | ID NO: | ID NO: | GENE NAME | change | P Value |
| R60170 | 31 | 221 | Guanine deaminase | 18.0 | 0.0002 |
| W85851 | 32 | | H. sapiens Chromosome 16 BAC clone- | 10.6 | 0.0002 |
| H86812 | 33 | 222 | Heparan sulfate (glucosamine) 3-O-sulfotransferase 1 | 7.9 | 0.0001 |
| AA496334 | 34 | 223 | dynamin 1 | 7.7 | 0.0001 |
| AA873159 | 35 | 224 | apolipoprotein C-I | 6.8 | 0.0003 |
| AA459296 | 36 | 225 | solute carrier family 34, member 2 | 6.5 | 0.0001 |
| AA451904 | 37 | 226 | epididymis-specific, whey-acidic protein type | 6.4 | 0.00004 |
| R93124 | 38 | 227 | aldo-keto reductase family 1, member C1 | 5.7 | 0.0003 |
| AA135886 | 39 | 228 | H. sapiens mRNA; cDNA DKFZp434F053 | 5.5 | 0.0001 |
| AA127965 | 40 | | integrin, β 8 - | 5.3 | 0.0002 |
| AA453310 | 41 | 229 | α-methylacyl-CoA racemase | 5.2 | 0.0001 |
| AA916325 | 42 | 230 | aldo-keto reductase family 1, member C3 | 5.0 | 0.0004 |
| AA478724 | 43 | 231 | insulin-like growth factor binding protein 6 | 4.9 | 0.0001 |
| AA416585 | 44 | 232 | angiotensin I converting enzyme 2 | 4.8 | 0.0002 |
| R51836 | 45 | | H. sapiens clone CDABP0036 mRNA sequence - | 4.6 | 0.0002 |
| AA430665 | 46 | 233 | claudin 4 | 4.5 | 0.0002 |
| AA456022 | 47 | 234 | fibronectin leucine rich transmembrane protein 3 | 4.5 | 0.0003 |
| AA664101 | 48 | 235 | aldehyde dehydrogenase 1 family, member A1 | 3.9 | 0.0096 |
| R35051 | 49 | | ESTs- | 3.9 | 0.0001 |
| AA704995 | 50 | 236, 237, | putative glycine-N-acyltransferase | 3.8 | 0.0066 |
| | | 238 | | | |
| AA757672 | 51 | 239 | ESTs | 3.8 | 0.0001 |
| AA464688 | 52 | | ESTs, Weakly similar to unnamed protein product - | 3.7 | 0.0001 |
| AA292226 | 53 | 240 | accessory proteins BAP31/BAP29 | 3.6 | 0.0055 |
| AA437099 | 54 | | ESTs- | 3.6 | 0.0002 |
| AA406126 | 55 | 241 | Nit protein 2 | 3.5 | 0.0001 |
| AA489246 | 56 | 242 | suppression of tumorigenicity 14 | 3.5 | 0.0029 |
| H69786 | 57 | 243 | H. sapiens MAIL mRNA, complete cds | 3.5 | 0.0018 |
| T94781 | 58 | 244 | potassium inwardly-rectifying channel, subfamily J, | 3.5 | 0.0040 |
| | | | member 15 | | |
| AA455632 | 59 | 245 | chromosome 3p21.1 gene sequence | 3.4 | 0.0070 |
| AA644088 | 60 | 246, 247 | cathepsin C | 3.3 | 0.0006 |

The top 30 differentially expressed cDNAs in papillary RCC are listed. They are significantly more highly expressed in papillary RCC compared to all other types of kidney tumors studied by 10,000 times of permutation test. Fold change indicates papillary RCC have relatively higher expression of this fold change compared to all other types of kidney tumors studied.

Chromophobe RCC and Oncocytoma

[0208] Table 3 shows about 30 genes that are more highly expressed in chromophobe RCC and oncocytoma than in the other types of kidney tumors studied herein.

[0209] FIGS. 1 and 2 showed that five chromophobe RCC and two oncocytoma clustered close together, suggesting that these two subtypes have similar gene expression patterns. The similarity in expression profile between chromophobe RCC and oncocytoma has been previously reported (Young, 2001, supra).

[0210] It is known that chromophobe RCC/oncocytoma contain abundant mitochondria. Genes related to mitochondrial biology and oxidative phosphorylation were over-expressed in our study, suggesting the high specificity of these gene expression to chromophobe RCC/oncocytoma.

[0211] Carbonic anhydrases (CA) are a family of zinc metalloenzymes. CA IX has been shown to be tightly regulated by hypoxia-inducible factor-1 in renal carcinoma. CAII null mice have been shown to have renal tubular acidosis (Lewis et al., Proc Natl Acad Sci USA 1988; 85(6):1962-6) and the inability of acidifying urine (Brechue et al., Biochim Biophys Acta 1991; 1066(2):201-7). CAII have been shown expressed in tubular cells of the outer medulla and cortico-medullary junction by CAII gene delivery to CAII deficiency mice (Lai et al., J Clin Invest 1998; 101(7):1320-5). Our immunostaining confirmed the above findings in normal kidney and further demonstrated positivity in all chromophobe RCC (10/10) and oncocytomas (5/5). This marker is less specific than GST-α or AMACR because of its expression in small subsets of other renal tumors (Table 4).

[0212] Five preferred genes whose increased expression is indicative of chromophobe RCC/oncocytoma have been described above.

[0213] Table 5 shows genes that are more highly expressed in sarcomatoid than in the other types of kidney tumors studied herein.

[0214] We studied three mixed clear cell/sarcomatoid RCC and two sarcomatoid RCC. Among the differentially expressed genes is the SPARC (Secreted protein acidic and rich in cysteine) gene, whose sequence is found in GenBank as accession number AA436142 (SEQ ID NO:93). SPARC is associated with cell-matrix interactions during cell proliferation and extracellular remodeling. It is also implicated in the neovascularization, invasion, and metastasis of cancers the gene encoding SPARC was highly expressed in RCC with sarcomatoid component.

[0215] The genes encoding extracellular matrix compounds such as fibronectin (GenBank accession number R62612 (SEQ ID NO:92)) and collagen VI (GenBank accession number H99676 (SEQ ID NO:103)) were also found over-expressed in RCC with a sarcomatoid component in our study. Type VI collagen has been found widely distributed in RCC and fibronectin is an important stromal component especially in poorly differentiated carcinomas (Lohi et al., Histol Histopathlol 1998; 13(3):785-96). Another study has shown that the addition of the extracellular matrix compounds, fibronectin and collagen IV, resulted in a 5-10 fold increase in invasion of a RCC cell line. The over-expression of these genes in RCC with sarcomatoid component may underlie the behavior of sarcomatoid RCC, which has a high rate of metastasis and poor prognosis. These findings may elucidate the mechanisms of invasion and metastasis of sarcomatoid RCC.

Sarcomatoid RCC

[0216] Five preferred genes whose increased expression is indicative of chromophobe sarcomatoid RCC have been described above.

Other Type of Kidney Tumors

[0217] Transitional Cell Carcinoma (TCC)

[0218] Table 6 shows genes that are more highly expressed TCC than in the other types of kidney tumors studied herein.

[0219] TCC arising in the renal pelvis may invade throughout the entire kidney and as such, it may be difficult to distinguish TCC from RCC. Finding new markers for TCC may assist in its diagnosis. The gene encoding keratin 14 (GenBank accession number H44051 (SEQ ID NO:120)) is normally expressed in the basal cells of squamous epithelium. Keratin 14 has been proposed as a useful marker of squamous cell carcinoma (Chu et al., Histopathology 2001; 39(1):9-16). It has also been found expressed in TCC with squamous morphology and focally expressed in TCC with no morphological evidence of squamous differentiation (Harnden et al., J Clin Pathol 1997, 50:1032). Keratin 14, which was the most differentially expressed gene in our study, may serve as a useful marker for TCC of kidney. Several genes that were highly specific for TCC are related to skin. Collagen type VII (GenBank accession number AA598507 (SEQ ID NO:121)), for example, is the main constituent of anchoring fibrils, which are found below the basal lamina at the dermal-epidermal basement membrane zone in the skin (Sakai et al., j Cell Biol 1986; 103(4):1577-86). Keratin 19 (K19) (GenBank accession number AA464250 (SEQ ID NO:122) has been found in the periderm, the transient superficial layer that envelops the developing epidermis (Van Muijen et al., Exp Cell Res 1987; 171(2):331-45). By immunohistochemistry, we found K19 expression in some renal tubules, benign transitional epithelium and in 100% of 5 cases of TCC (Table 4 Integrin β-4 (GenBank accession number AA485668 (SEQ ID NO:125)) is expressed in human epidermis and restricted to the ventral surface opposed to the basal membrane zone. Integrin β-4 has been found to be associated with the hemidesmosomes in stratified and transitional epithelia (Jones et al., Cell Regul 1991; 2(6):427-38). Ladinin (GenBank accession number T97710 (SEQ ID NO:126)) is associated with the basement membrane located beneath hemidesmosomes (Moll et al., Virchows Arch 1998; 432(6):487-504). Taken together, these skin lesion-related genes may be specific markers for TCC of kidney.

[0220] Five preferred genes whose increased expression is indicative of TCC have been described above.

TABLE 3
Genes relatively more highly expressed in chromophobe RCC/oncocytoma

| | NT SEQ | AA SEQ | | Fold | |
|---|---|---|---|---|---|
| Accession ID | ID NO: | ID NO: | GENE NAME | change | P Value |
| H57180 | 61 | 248 | phospholipase C, γ 2 | 19.6 | 0.0001 |
| H23187 | 62 | 249 | carbonic anhydrase II | 13.8 | 0.0001 |
| AA399633 | 63 | | ESTs- | 9.9 | 0.0001 |
| N89673 | 64 | 250 | PPAR, γ, coactivator 1 | 9.2 | 0.0001 |
| W95082 | 65 | 251 | hydroxysteroid (11-β) dehydrogenase 2 | 9.0 | 0.0001 |
| N93505 | 66 | 252 | transmembrane 4 superfamily member 2 | 8.9 | 0.0001 |
| R59722 | 67 | | hypothetical protein FLJ10851 - | 8.3 | 0.0011 |
| T60160 | 68 | 253 | H. sapiens mRNA; cDNA | 7.6 | 0.0001 |
| H17036 | 69 | 254 | DHHC1 protein | 7.6 | 0.0001 |
| AA446650 | 70 | | H. sapiens mRNA; cDNA DKFZp586M0723 - | 7.5 | 0.0001 |
| R16134 | 71 | 255 | Plasmolipin | 7.2 | 0.0001 |
| AA406233 | 72 | 256 | ESTs, Highly similar to similar to GTPase-activating proteins | 7.1 | 0.0001 |
| T49816 | 73 | 257 | ESTs | 7.0 | 0.0001 |
| H22944 | 74 | 258 | nicotinamide nucleotide transhydrogenase | 6.9 | 0.0001 |
| R43873 | 75 | 259 | Human Chromosome 16 BAC clone CIT987SK-A-101F10 | 6.8 | 0.0001 |
| AA463445 | 76 | 260 | homolog of yeast ubiquitin-protein ligase Rsp5 | 6.7 | 0.0001 |
| N54401 | 77 | 261 | Rag D protein | 6.5 | 0.0001 |
| H22856 | 78 | 262 | glutamic-oxaloacetic transaminase 1, soluble | 6.3 | 0.0001 |
| R09053 | 79 | 263 | ESTs | 6.1 | 0.0001 |
| AA406362 | 80 | 264 | prostaglandin E receptor 3 (subtype EP3) | 6.1 | 0.0001 |
| H97921 | 81 | | ESTs - | 6.0 | 0.0001 |
| W31540 | 82 | | KIAA1450 protein - | 5.9 | 0.0001 |
| AA427619 | 83 | 265 | 1,2-α-mannosidase IC | 5.9 | 0.0001 |
| W47387 | 84 | | ecotropic viral integration site 5- | 5.7 | 0.0004 |
| N29800 | 85 | | hypothetical protein FLJ20783 - | 5.7 | 0.0001 |
| H99738 | 86 | 266 | Rag D protein | 5.7 | 0.0001 |
| AA894557 | 87 | 267 | Creatine kinase, brain | 5.7 | 0.0001 |
| AA452566 | 88 | 268 | Peroxisomal membrane protein 3 (35 kD) | 5.7 | 0.0001 |
| AA504265 | 89 | 260 | LIM and senescent cell antigen-like domains 1 | 5.6 | 0.0001 |
| AA682684 | 90 | 270 | Protein tyrosine phosphatase, non-receptor type 3 | 5.5 | 0.0001 |

The top 30 differentially expressed cDNAs in are listed. They are significantly more highly expressed in chromophobe RCC/oncocytoma compared to all other types of kidney tumors studied by 10,000 times of permutation test. Fold change indicates chromophobe RCC/oncocytoma have relatively higher expression of this fold change compared to all other types of kidney tumors studied.

[0221] TABLE 4
Immunohistochemical Reactivity of Four
Markers in 40 Primary Kidney Tumors

| | Clear | | Chromo- | Onco- | |
|---|---|---|---|---|---|
| | Cell | Papillary | phobe | cytoma | TCC |
| Marker | n = 10 | N = 10 | n = 10 | n = 5 | n = 5 |
| GST-α | 90% | 0% | 10% | 0% | ND |
| AMACR | 10% | 100% | 0% | 0% | ND |
| CA II | 30% | 10% | 100% | 100% | 20% |
| K19 | 0% | 10% | 0% | 0% | 100% |

[0222] TABLE 5
Relatively more highly expressed genes in sarcomatoid RCC

| | NT SEQ | AA SEQ | | # | Abs | ˜p | ˜FDR |
|---|---|---|---|---|---|---|---|
| UNIQID | ID NO | ID NO | GENE NAME | samples >1 | chg | value | (%) |
| AA670438 | 91 | | Ubiquitin carboxyl-terminal esterase L1 | 7 | 5.9 | 0.0009 | 0.8 |
| | | | (ubiquitin thiolesterase)- | | | | |
| R62612 | 92 | 271, 272 | Fibronectin 1 | 49 | 4.7 | 0.0081 | 2.3 |
| AA436142 | 93 | 273 | sparc/osteonectin, cwcv and kazal-like | 9 | 3.8 | 0.0021 | 1.1 |
| | | | domains proteoglycan (testican) | | | | |
| AA046525 | 94 | | H. sapiens, α-1 (VI) collagen- | 6 | 3.7 | 0.0019 | 1.1 |
| AA459305 | 95 | 274 | procollagen-lysine, 2-oxoglutarate 5- | 25 | 3.6 | 0.0001 | 0.3 |
| | | | dioxygenase 3 | | | | |
| AA487846 | 96 | | ESTs- | 36 | 3.5 | 0.0077 | 2.3 |
| AA464152 | 97 | 275 | quiescin Q6 | 15 | 3.4 | 0.0020 | 1.1 |
| W73810 | 98 | 276 | epithelial membrane protein 3 | 26 | 3.2 | 0.0008 | 0.8 |
| AA419177 | 99 | 277 | solute carrier family 7 (cationic amino | 17 | 2.9 | 0.0041 | 1.5 |
| | | | acid transporter, y+ system), member 5 | | | | |
| W45275 | 100 | 278 | CD44 antigen (homing function and | 21 | 2.9 | 0.0027 | 1.2 |
| | | | Indian blood group system) | | | | |
| AA678318 | 101 | 279 | hypothetical protein FLJ22341 | 12 | 2.7 | 0.0051 | 1.7 |
| H61003 | 102 | | EST- | 35 | 2.7 | 0.0078 | 2.2 |
| H99676 | 103 | 280 | collagen, type VI, α 1 | 13 | 2.7 | 0.0095 | 2.5 |
| AA448400 | 104 | 281 | plectin 1, intermediate filament binding | 17 | 2.6 | 0.0008 | 0.8 |
| | | | protein, 500 kD | | | | |
| AA504461 | 105 | 282 | low density lipoprotein receptor | 1 | 2.6 | 0.0006 | 0.8 |
| | | | (familial hypercholesterolemia) | | | | |
| AA521232 | 106 | 283 | HSPC022 protein | 14 | 2.5 | 0.0011 | 0.9 |
| AA402874 | 107 | 284 | phospholipid transfer protein | 12 | 2.3 | 0.0015 | 0.9 |
| AA426212 | 108 | 285 | Procollagen-proline, 2-oxoglutarate 4- | 33 | 2.3 | 0.0046 | 1.7 |
| | | | dioxygenase (proline 4-hydroxylase), β | | | | |
| | | | polypeptide (protein disulfide | | | | |
| | | | isomerase; thyroid hormone binding | | | | |
| | | | protein p55) | | | | |
| R44617 | 109 | 286 | MyoD family inhibitor | 14 | 2.3 | 0.0040 | 1.6 |
| W96107 | 110 | 287 | Sec61 γ | 20 | 2.3 | 0.0028 | 1.2 |
| AA186348 | 111 | 288, 289 | neuropathy target esterase | 5 | 2.2 | 0.0024 | 1.2 |
| H81907 | 112 | 290 | ankylosis, progressive (mouse) homolog | 4 | 2.2 | 0.0021 | 1.1 |
| N34466 | 113 | 291 | hypothetical protein DKFZp434 H0820 | 13 | 2.2 | 0.0019 | 1.1 |
| AA436406 | 1114 | 292 | N-myristoyltransferase 1 | 8 | 2.1 | 0.0025 | 1.2 |
| AA459400 | 115 | 293 | Rho GDP dissociation inhibitor (GDI) α | 8 | 2.1 | 0.0014 | 0.9 |
| AA454864 | 116 | 294 | ESTs, Weakly similar to A4P_human | 8 | 2 | 0.0013 | 0.9 |
| | | | intestinal membrane A4 protein | | | | |
| AA485714 | 117 | 295 | hypothetical protein FLJ22439 | 9 | 2 | 0.0093 | 2.5 |
| AA683550 | 118 | 296 | Interleukin-1 receptor-associated kinase 1 | 6 | 2 | 0.0018 | 1.1 |
| R17096 | 119 | | ESTs, Weakly similar to KE03 protein | 9 | 1.9 | 0.0034 | 1.4 |
| | | | [H. sapiens] | | | | |

[0223] TABLE 6
Relatively more highly expressed genes in TCC

| | SEQ | | # | abs | ˜p | ˜FDR |
|---|---|---|---|---|---|---|
| UNIQ ID | ID NO | NAME | samples >1 | chg | value | (%) |
| H44051 | 120 | keratin 14 (epidermolysis bullosa simplex, | 11 | 53.6 | 0.0001 | 0.3 |
| | | Dowling-Meara, Koebner) 17q12-q21 | | | | |
| AA598507 | 121 | collagen, type VII, α 1 (epidermolysis bullosa, | 11 | 18.3 | 0.0001 | 0.3 |
| | | dystrophic, dominant and recessive) | | | | |
| AA464250 | 122 | Keratin 19 | 15 | 14.4 | 0.0016 | 1 |
| N49853 | 123 | plexin B3 | 3 | 11.7 | 0.0004 | 0.5 |
| AA478481 | 124 | ESTs, Moderately similar to CA1C rat | 12 | 9.9 | 0.0016 | 1 |
| | | collagen α 1(XII) chain [R. norvegicus] | | | | |
| AA485668 | 125 | integrin, β 4 | 5 | 9.9 | 0.0001 | 0.3 |
| T97710 | 126 | ladinin 1 | 4 | 8.7 | 0.0001 | 0.3 |
| AA457728 | 127 | ESTs | 14 | 7.7 | 0.0005 | 0.5 |
| AA406020 | 128 | interferon-stimulated protein, 15 kDa | 22 | 5.8 | 0.0013 | 0.9 |
| AA457114 | 129 | tumor necrosis factor, α-induced protein 2 | 13 | 5.8 | 0.0011 | 0.8 |
| AA434390 | 130 | Hypothetical protein PRO0899 | 7 | 5.7 | 0.0027 | 1.2 |
| H22919 | 131 | cystatin B (stefin B) | 15 | 5.6 | 0.0002 | 0.4 |
| AA025408 | 132 | ESTs | 9 | 5.5 | 0.0006 | 0.6 |
| AA150053 | 133 | TEA domain family member 3 | 3 | 5.3 | 0.0001 | 0.3 |
| AA453783 | 134 | H. sapiens mRNA; cDNA DKFZp564B1264 | 2 | 4.9 | 0.0052 | 1.6 |
| | | (from clone DKFZp564B1264) | | | | |
| AA464731 | 135 | S100 calcium-binding protein A11 | 31 | 4.8 | 0.0023 | 1.1 |
| | | (calgizzarin) | | | | |
| N57743 | 136 | RelA-associated inhibitor | 9 | 4.8 | 0.0001 | 0.3 |
| AA426216 | 137 | malignant cell expression-enhanced | 5 | 4.5 | 0.0004 | 0.5 |
| | | gene/tumor progression-enhanced gene | | | | |
| H97778 | 138 | cadherin 1, type 1, E-cadherin (epithelial) | 8 | 4.5 | 0.0038 | 1.4 |
| AA430665 | 139 | claudin 4 | 10 | 3.9 | 0.0083 | 2.2 |
| AA022558 | 140 | H. sapiens cDNA: FLJ22120 fis, clone | 25 | 3.8 | 0.0003 | 0.4 |
| | | HEP 18874 | | | | |
| AA706987 | 141 | UDP-N-acetyl-α-D-galactosamine: polypeptide | 20 | 3.8 | 0.0002 | 0.4 |
| | | N-acetylgalactos_aminyltransferase 1 | | | | |
| | | (GalNAc-T1) | | | | |
| AA481745 | 142 | H. sapiens clone 23763 unknown mRNA, | 10 | 3.7 | 0.0002 | 0.4 |
| | | partial cds | | | | |
| R17096 | 143 | ESTs, Weakly similar to KE03 protein | 9 | 3.5 | 0.0006 | 0.6 |
| | | [H. sapiens] | | | | |
| H03961 | 144 | H. sapiens CAC-1 mRNA, partial cds | 15 | 3.3 | 0.0073 | 2 |
| AA436163 | 145 | prostaglandin E synthase | 4 | 3.2 | 0.0035 | 1.4 |
| AA455896 | 146 | glypican 1 | 14 | 3.2 | 0.0061 | 1.8 |
| AA406266 | 147 | Hypothetical protein FLJ23309 | 1 | 3.1 | 0.0037 | 1.4 |
| AA434159 | 148 | chromosome 19 open reading frame 3 | 5 | 3.1 | 0.0018 | 1 |
| H26294 | 149 | adaptor-related protein complex 1, γ2 subunit | 10 | 3.1 | 0.0002 | 0.4 |
| AA125872 | 150 | angiopoietin 2 | 13 | 3 | 0.0005 | 0.5 |
| AA436410 | 151 | branched chain aminotransferase 2, | 14 | 3 | 0.0028 | 1.2 |
| | | mitochondrial | | | | |
| AA485734 | 152 | Ran GTPase activating protein 1 | 4 | 3 | 0.0002 | 0.4 |
| AA620747 | 153 | ESTs | 4 | 3 | 0.0039 | 1.4 |
| H15456 | 154 | calpain 1, (mu/I) large subunit | 8 | 3 | 0.0018 | 1 |
| W95682 | 155 | H. sapiens cDNA FLJ20153 fis, clone | 28 | 3 | 0.0009 | 0.7 |
| | | COL08656, highly similar to AJ001381 H. | | | | |
| | | sapiens incomplete cDNA for a mutated allele | | | | |
| AA001718 | 156 | ESTs | 5 | 2.9 | 0.0020 | 1 |
| AA455284 | 157 | hypothetical protein | 4 | 2.9 | 0.0001 | 0.3 |
| H18080 | 158 | H. sapiens mRNA; cDNA DKFZp667O2416 | 4 | 2.9 | 0.0011 | 0.8 |
| | | (from clone DKFZp667O2416) | | | | |
| H44956 | 159 | fumarylacetoacetate | 4 | 2.9 | 0.0042 | 1.4 |
| AA598513 | 160 | protein tyrosine phosphatase, receptor type, F | 11 | 2.8 | 0.0006 | 0.6 |
| H99033 | 161 | EST | 5 | 2.8 | 0.0004 | 0.5 |
| AA047443 | 162 | LIM domain-containing preferred translocation | 2 | 2.7 | 0.0028 | 1.2 |
| | | partner in lipoma | | | | |
| AA459381 | 163 | AA459381 sphingosine-1-phosphate lyase 1 | 3 | 2.7 | 0.0015 | 0.9 |
| AA707696 | 164 | COBW-like protein | 2 | 2.6 | 0.0002 | 0.4 |
| AA877255 | 165 | interferon regulatory factor 7 | 3 | 2.6 | 0.0063 | 1.8 |
| N45236 | 166 | N45236 ESTs | 2 | 2.6 | 0.0020 | 1 |
| AA131707 | 167 | ESTs | 3 | 2.5 | 0.0007 | 0.6 |
| AA464963 | 168 | ESTs | 4 | 2.5 | 0.0040 | 1.4 |
| AA878576 | 169 | chromosome 19 open reading frame 3 | 8 | 2.5 | 0.0001 | 0.3 |
| H56069 | 170 | H56069 glutamate-cysteine ligase, catalytic | 1 | 2.5 | 0.0011 | 0.8 |
| | | subunit | | | | |
| H65395 | 171 | proteasome (prosome, macropain) activator | 10 | 2.5 | 0.0012 | 0.8 |
| | | subunit 2 (PA28 β) | | | | |
| AA046043 | 172 | endosulfine α | 2 | 2.4 | 0.0013 | 0.9 |
| AA401972 | 173 | RAB2, member RAS oncogene family-like | 1 | 2.4 | 0.0045 | 1.4 |
| AA430576 | 174 | KIAA0657 protein | 2 | 2.4 | 0.0088 | 2.3 |
| AA496541 | 175 | KIAA0317 gene product | 0 | 2.4 | 0.0080 | 2.1 |
| AA459658 | 176 | ESTs | 2 | 2.3 | 0.0007 | 0.6 |
| AA669042 | 177 | actinin, α 1 | 9 | 2.3 | 0.0080 | 2.1 |
| AA706829 | 178 | utative Rab5-interacting protein | 11 | 2.3 | 0.0056 | 1.6 |
| H29625 | 179 | hypothetical protein FLJ20411 | 5 | 2.3 | 0.0022 | 1.1 |
| AA156793 | 180 | AA156793 nuclear receptor coactivator 3 | 6 | 2.2 | 0.0044 | 1.4 |
| AA679352 | 181 | farnesyl-diphosphate farnesyltransferase 1 | 3 | 2.2 | 0.0015 | 0.9 |
| H42874 | 182 | ubiquitin specific protease 21 | 2 | 2.2 | 0.0051 | 1.6 |
| H56903 | 183 | H. sapiens mRNA; cDNA DKFZp434A1114 | 7 | 2.2 | 0.0077 | 2.1 |
| | | (from clone DKFZp434A1114) | | | | |
| N50834 | 184 | mevalonate (diphospho) decarboxylase | 3 | 2.2 | 0.0039 | 1.4 |
| AA427887 | 185 | KIAA1436 protein | 21 | 2.1 | 0.0044 | 1.4 |
| AA453512 | 186 | diacylglycerol O-acyltransferase (mouse) | 7 | 2.1 | 0.0018 | 1 |
| | | homolog | | | | |
| AA454556 | 187 | hypothetical protein FLJ10767 | 9 | 2.1 | 0.0030 | 1.3 |
| R74078 | 188 | H. sapiens mRNA for KIAA1741 protein, | 8 | 2.1 | 0.0019 | 1 |
| | | partial cds | | | | |
| W89187 | 189 | brefeldin A-inhibited guanine nucleotide- | 2 | 2.1 | 0.0053 | 1.6 |
| | | exchange protein 1 | | | | |
| AA459399 | 190 | AA459399 KIAA0356 gene product | 2 | 2 | 0.0069 | 1.9 |
| AA459402 | 191 | KIAA1631 protein | 5 | 2 | 0.0040 | 1.4 |
| H19340 | 192 | H19340 membrane interacting protein of | 8 | 2 | 0.0096 | 2.4 |
| | | RGS16 | | | | |
| AA191356 | 193 | eukaryotic translation initiation factor 4 γ, 2 | 2 | 1.9 | 0.0097 | 2.4 |

Wilms' Tumors (WT)

[0224] Insulin-like growth factor II (IGF II) gene (GenBank accession number N74623 (SEQ ID NO:195)) is one of the differentially expressed genes in WT. IGF II is located on chromosome 11p15, which is usually imprinted (only expressed in the paternally derived allele). In Beckwith-Wiedeman disease, a hereditary form of WT, some patients constitutionally lose the imprinting of IGF II. Some sporadic WT also show the loss of imprinting of IGF II and this may result in high expression of IGF H in WT.

[0225] Glypican 3 (GenBank accession number AA775872 (SEQ D NO: 194)) is a heparan sulfate proteoglycan and usually expressed in the fetal mesodermal tissue. Its disruption leads to gigantism or overgrowth. In this study, glypican 3 was the most differentially expressed gene in WT High expression of IGFII and glypican 3 may be a specific characteristic in WT.

[0226] From the foregoing description, one skilled in the art can easily ascertain the essential characteristics of this invention, and without departing from the spirit and scope thereof, can make changes and modifications of the invention to adapt it to various usage and conditions.

[0227] Without further elaboration, one skilled in the art can, using the preceding description, utilize the present invention to its fullest extent. The preferred specific embodiments disclosed above are to be construed as merely illustrative, and are not intended to limit the scope of the invention.

[0228] The entire disclosure of all patent applications, patents and other publications, cited above and in the figures are hereby incorporated by reference in their entirety.

The application's sequence listing, which the Patent Office published only in electronic form, follows.

SEQUENCE LISTING (296 sequences)

SEQ ID NO: 1 - DNA, 343 bp, homo sapiens
  misc_feature (12)..(12): n is a, c, g, or t
  misc_feature (56)..(56): n is a, c, g, or t
  misc_feature (89)..(89): n is a, c, g, or t
  misc_feature (91)..(92): n is a, c, g, or t
  misc_feature (196)..(197): n is a, c, g, or t
  misc_feature (239)..(239): n is a, c, g, or t
  misc_feature (260)..(260): n is a, c, g, or t
  misc_feature (276)..(276): n is a, c, g, or t
  misc_feature (281)..(281): n is a, c, g, or t
  misc_feature (314)..(314): n is a, c, g, or t
  misc_feature (331)..(331): n is a, c, g, or t
ttttttttttgntgaggttgcttttattccaagaactctgtgagctccacccaganaccattggcgcctgcttgtgtccccaggggccntnnacacaacagcaccagcaccatgagggcgctctcgacccacacaagccctgggccccgtcagtcaatgtgactgagtccgccattgaggccagtctggctggccnnaagtggtccctctgagtccccaactccctggccagcaaggantgaagctccatgccccttggnccacgcctctagagtntgagnatatcctgcagcctcgatctcaggaggcaacgnatgcagcccccctgcantcaggaaagggg

SEQ ID NO: 2 - DNA, 322 bp, homo sapiens
  misc_feature (232)..(232): n is a, c, g, or t
  misc_feature (234)..(234): n is a, c, g, or t
  misc_feature (236)..(236): n is a, c, g, or t
  misc_feature (248)..(248): n is a, c, g, or t
  misc_feature (274)..(274): n is a, c, g, or t
  misc_feature (282)..(282): n is a, c, g, or t
catagaggggttggaggaagacggtctgagagaagaggccgcgagacccaggtgcacagaagccccggccccacggctacttcgcgccccaggaggtgtgggcagggccgccgcggagggaggctgcaggtgtgtcaggaggcacctggccggaggtcaccccctccttctggaccctcagcagagttgaggcgcctgcaccccaggggagccaggctgctatctaaaggantntnaggtgcggtcanttccgccactggccggtgtcggggtntgggaaancctgagaccctaagctctcctggctgctctctcaaaccct

SEQ ID NO: 3 - DNA, 465 bp, homo sapiens
  misc_feature (9)..(9): n is a, c, g, or t
  misc_feature (274)..(274): n is a, c, g, or t
  misc_feature (304)..(304): n is a, c, g, or t
  misc_feature (348)..(348): n is a, c, g, or t
  misc_feature (422)..(422): n is a, c, g, or t
  misc_feature (457)..(457): n is a, c, g, or t
agtttccanttttactgaatttgtaattccaagaaaattgttggctaggaggagattggaaaactgaattcacatcagatcctaatgagaagaaatcaattttaactaagtgggtgaataggagttgtattatttaattagcatataatttgaaagagttcattagcttcacaacaggcacaatcaacacttaggtaaagcacttaatttttgcaaaactttagaatactggtcttgcatgttcttgacctctatggctggtttattaaaaccnggaaaatcttccttggattcttctaaaggntttctcatccatggggagggcttccttggggctgccagggctgntagggaaacttccttccactgtgggggcagggttactggattctgggttttcaggggccttcagccagaggggnaagctggggaaataagggctaggaggtccaagctnttccccgg

SEQ ID NO: 4 - DNA, 411 bp, homo sapiens
  misc_feature (355)..(355): n is a, c, g, or t
  misc_feature (395)..(395): n is a, c, g, or t
ttaagaggaagaacatgtagctcactttattttccccaaagatgtcttgaaattttaatcagttcagtcatccctatctttcttcttacatattaatcctatagattagtgactcttgtataagacaagaaaaactaatgtgcttgtttgatatcagcacagatcagtctctaagcagaagtgaaaatatgggaaaatgagttggaaaggaaaatgttatagaaaatagtaaagacaaaccatgggaccaccttttctcagtgagagatacattgtcgggggcagagtgctggagagctgggcagagaggaacaaaatgtctgacagcaggagccggagcccagggaggaaaccnagatggaaagggctctgctcagactgactccatgtgggcnccttatgggataaagg

SEQ ID NO: 5 - DNA, 434 bp, homo sapiens
tgctgccaaaagcctttaatatgccctggtcccaggctgtgttcatgaaagcggacacagcagtgcttccagcttcatggttcccaggttcaggttcctcccagcggaggtgggagggcagccctcacacctggcacccctgagtgcatactcctggaggaagtcgttgagctgggcacaggctgctcgctggcgttgtctccggcacaggcgttcagagggcatctcctcgatccagctattcgagtccagcaggtactgggggtgtcctcgaggtcataggtggccccatctagacccatgatcaaatattctttcccaggttccaagcgaaggcgtcaggaggctcgaaccaggaagttgcgcatctgattagcagcggccttgacatccttggtgaagtgcaggacttgggtgatcttggtctcaaagag

SEQ ID NO: 6 - DNA, 373 bp, homo sapiens
tttggtgttttgaagataaatgtcattagtctatgataatagcatcataggacaattagccattttagacttgaccatattttctctttttagcatatagccatcttgatatttaggtgggagactactccaatggagcaacagtttcattttacatgattggatttagaaatttacaaattttaaactcataagaattctaaataatttgaaaatggaaacatttgacccacagtctagcagcataaatacatttataaaatacttcattgttgatcttaggtcattgatttaaaacagaatttggtgactatgggcaggtggagggggccagtgaggaaggtataaaagagaaatctttatgaattgtgtt

SEQ ID NO: 7 - DNA, 493 bp, homo sapiens
  misc_feature (245)..(245): n is a, c, g, or t
  misc_feature (473)..(473): n is a, c, g, or t
gggttcacacacaaacattcaggaagcagcactggtgtagacccactttgatcccgtaaagtgtcctgagtgtccctcttcacatggccacttcttttgccaggttctttggttccctgcttgggatacaccagtcatcagcctcagagctcatctgataatgtttgaaggctgacttgttaaaaactggaagtttttcctaatagacctcagaagacaaagcccttttaagtagaatgatagcnatctggttcccataatccctgattaaaggagtaagaagattcaggatctcccttggaaaaggtacttttggcataccaggaccgaggaaattttggccaaggccggtaaaacccaaaaacccaggcccaaaaagggaaggcaatttcccgggggaatttaatcccatccaccaggggccgtttggggttgcagttgggaagttaatggtataaactaaaagaaggccnggtcaattaaattctcaggg

SEQ ID NO: 8 - DNA, 475 bp, homo sapiens
ctagttcttcctcagtgagagggaggtactgttctaccaacagctctgatttggtgagtgcattttctacgccactgctcacgagctgcatcatccgactccccaagactgtgttaatgctgccactgaccacagacttggtcttctccacactgccagtcactgcccctttggtcttgtccatcacccctgtgatcgtgctggccacagaatccttggccccagtcacagtagtcgtcacagcatcttttgccccagtcacagcgcctttggagttggcaacaatctgagttgatggctgattcagaataggcagtctctcctcaatcctgtctagccccttacaggcataggtattggcaactgcaatttgcggctctagcttctggatgatgggcagagcactggtcatggccacggaagtgatggtcttcaaacggttctctgccatctcacacacagacttcaggtaggg

SEQ ID NO: 9 - DNA, 267 bp, homo sapiens
  misc_feature (240)..(240): n is a, c, g, or t
  misc_feature (245)..(245): n is a, c, g, or t
agagttcttatcgctgtttattgaaacctcccatcaaagaaaagtgtgggaggcaagaaggggaggacttctcatcttgttaagactcagtcttgttaggactgagccaggggatatcaggggacctcaggggaagaggaccgggacagtgggggaaggtggccagtggggaagggctagacagaagaatggcagggctgggttgcagggagaacaagggcagggatggctgaacctttnaactngccagggctgggcaggaggctc

SEQ ID NO: 10 - DNA, 400 bp, homo sapiens
  misc_feature (27)..(27): n is a, c, g, or t
  misc_feature (33)..(34): n is a, c, g, or t
  misc_feature (56)..(56): n is a, c, g, or t
  misc_feature (58)..(58): n is a, c, g, or t
  misc_feature (60)..(60): n is a, c, g, or t
  misc_feature (62)..(66): n is a, c, g, or t
  misc_feature (203)..(203): n is a, c, g, or t
  misc_feature (297)..(297): n is a, c, g, or t
  misc_feature (301)..(301): n is a, c, g, or t
  misc_feature (319)..(319): n is a, c, g, or t
  misc_feature (359)..(359): n is a, c, g, or t
  misc_feature (395)..(395): n is a, c, g, or t
gtattataaatctgctttatttagcantttctnntagcgaagagcacagaaatcancncngnnnnncaggctttgtacatcataggactagtcacttgtgctttcatggatactgcctgggtgggggttcacaacacttataagttagagagtttgagagccagtggaaagtaagtggaagttgttctgaaataagcccctgnaattttctgcaatgaaaaggagcagaggtcattttcttataatgctcagcctcagagatagaacactggaggcaagaaattaataatttagtancaangtggaaggctccagtggngattacatcatgatgtaaaatcagaggttgatctggatgngttgagcaaatgggtgctcagatgggtattagaganagaga

SEQ ID NO: 11 - DNA, 463 bp, homo sapiens
  misc_feature (27)..(27): n is a, c, g, or t
  misc_feature (39)..(39): n is a, c, g, or t
  misc_feature (234)..(234): n is a, c, g, or t
  misc_feature (387)..(387): n is a, c, g, or t
  misc_feature (428)..(428): n is a, c, g, or t
  misc_feature (438)..(438): n is a, c, g, or t
  misc_feature (450)..(450): n is a, c, g, or t
ttttttttttttttttttttttatgangtgttttatggnttacaaaccacttaaagctcaccatttcttttgattcttacaagaactttctttatggaaggaaacattatcctcttttcatctcctagataaaaaggtaaactatttagcatataaatgattttcccaaggctaattcggacgagacagtagagctggggatttgggatctagttttctctgagtcaaattccnctgatctttcttgaaagtcactttcattttgtcccaacacatctgaggcagacaccagtgggtttcaggaacacgtgccatgtcttcttactttccttgcccctttctttcttaacaatattacacctgaggggacagcgcagagggggggtngactgactgggggaaatggggggataccccttttttaaaanttcaggggtncaggtttccccnttgtttggggggg

SEQ ID NO: 12 - DNA, 294 bp, homo sapiens
  misc_feature (200)..(200): n is a, c, g, or t
  misc_feature (231)..(231): n is a, c, g, or t
  misc_feature (239)..(239): n is a, c, g, or t
  misc_feature (244)..(244): n is a, c, g, or t
  misc_feature (268)..(268): n is a, c, g, or t
  misc_feature (274)..(274): n is a, c, g, or t
  misc_feature (281)..(281): n is a, c, g, or t
  misc_feature (288)..(288): n is a, c, g, or t
acacatggtgttagaaaatgaattttggcaccgtgattaagaatttcttttcaagtttaacctttacattaaaaacagtagctacaataaggatatttcaaccttacttagagaagtgataaaacatcaagtcaacaagtatttttgttggagaatttttttataagcgggatagagggaagttaacatagacactcagnagaataaaatggaaattatgccaggaagatnaaaaagcnaatanccctccccccaaagaaagaattanggagcngtgacanagggcanaaccgg

SEQ ID NO: 13 - DNA, 335 bp, homo sapiens
  misc_feature (4)..(4): n is a, c, g, or t
  misc_feature (34)..(34): n is a, c, g, or t
  misc_feature (84)..(84): n is a, c, g, or t
  misc_feature (87)..(87): n is a, c, g, or t
  misc_feature (226)..(226): n is a, c, g, or t
gcgnccgcgctgctcctgctgctgctcggcgctngtacaccgcgcgtgtcggacgggtccaaatgcaagtgctcccggaagacnccnaagatccgctacagcacgtgaagaagctggaaatgaagccaaagtacccgcactgcgaggagaagatggttatcatcaccaccaagagcgtgtccaggtaccgaggtcaggagcactgcctgcaccccaagctgcaganaccaagcgcttcatcaagtggtacaacgcctggaacgagaagcgcagggtctacgaagaatacgggtgaaaaacctcagaagggaaaactccaaaccagttgggagact

SEQ ID NO: 14 - DNA, 452 bp, homo sapiens
  misc_feature (134)..(134): n is a, c, g, or t
agcaaataggagtttttattatttaattagcatataattggaaagggttcattagctttacaacaggcacaatcaacacttaagtaaagcacttcattgttgcaaaactttagaatattggtcctgcatgttcntagcctccatggctgctttattaaaacctgaaaatctttctggcttcttctaaagcttttgcatctgcgggaggcttccttgggctgccaggctgtagaaacttcttcaccgtgggcaggttgctgattctggttttcagggccttcagcagagggaagttggagataaggctggagtcaagctcttccacatagtagagaagttccaccaggctaatgtcagcccggctcagcttgttgccaacaaggtagtcttgtccatggctctgtaacactttttcgaaggcaggggaaatagcgactttttgttttcccctt

SEQ ID NO: 15 - DNA, 438 bp, homo sapiens
tttctgccagtagccctgtttaaactcttgaaccccagtcacagttttccagaagtccatcaggatagaattttcactaatcgccaaatgcccaaagcttagttctttcttagaaggaaaagaagaggtcaaatggacaggagagagcggagattggttgttctcaggggctccttccctttgcctgcttctttcatttgggacgccagaccttgacctggaagtgaggtcactattgggcagtggagtgtgagaaaggactttggcctgggggctgcaagttacagattaacacggggaggggtgaggagggacccagagggaggaaaggtggccagaggaagggacagctgacctggcacaatctgggcttgaagggggcacaacaagagcgtctgtgagctggtgctgtctggagggatcttggctcctctccgg

SEQ ID NO: 16 - DNA, 407 bp, homo sapiens
  misc_feature (380)..(380): n is a, c, g, or t
  misc_feature (403)..(403): n is a, c, g, or t
aatcttaaatgaattatttatttatttttaaaatctgaggaataaatgcaagtttttaaaagtagcaaggacatgtaaacagaaattgcttctatatattttaatacaaaatccacatttattattagcaccaatgatttaacttacaaatatattctgactccctggttttaagagcaatagcttaagttaaatacacagttcatctcttccaaagtcaaaaacaataaaataaaataacaccgacaagcaatagtagcaatgggcaatttgaaaacatagtacctttaatgttaatgggacttcaatagctcagtacaaactatataattaatatggtagcattagatgtcagttggacttttggattcttacagtcntgttgtaatcagtttcatagacnttta

SEQ ID NO: 17 - DNA, 582 bp, homo sapiens
  misc_feature (485)..(485): n is a, c, g, or t
  misc_feature (527)..(527): n is a, c, g, or t
  misc_feature (536)..(536): n is a, c, g, or t
  misc_feature (559)..(559): n is a, c, g, or t
tcaagataatcatttagatttatttttaaaaaaagaggagagttctcttattgattttataagagcaaaggcaacagtcagccattcttttggctaattcatatgatcctcaagtaaaacttaagcccaggttactttggtaggatttaaagtagtaagacatatgtgaataaaatgatattaggtctgtataattctgaataataaaataaagattaagatggtaatattggtccctcaagtactggtatttaaactttaaaaatcaatcaagagagaagattaagtggtgtttctttggtactgaaaatgtaaagctaagaccaaattgttctacttcacagatttaagatacaaagaatgatatttaaaggtattaaaataactatttcattatcttcagtttgtaaagaatatcttatgaagtacattagaaggaatccctgagtatattaagtactctattagtatcttctctaaacaangaggaaccatttaaaggcttgccagacattaaacccgtgctnggtaaagcnttatcggttataggctcctccangtgctgtaattagccccaatgct

SEQ ID NO: 18 - DNA, 148 bp, homo sapiens
caaagattcactttatttattcattctcctccaacattagcataattaaagccaagagggcgcatgggggtgaggtgaaagatgagctggaggaccgcaataggggtaggacacctgtcgaaaaagggtcagaggccaaaggatggga

SEQ ID NO: 19 - DNA, 410 bp, homo sapiens
caggtttttattatttattattattgtttgttttgagatgcaatcttgctctgtcacgcaggttggtgtgcaatggtgcgatcttggctcactacaacctccgcctcacgggttcaagcaattctcctgcctcagcctcccaagtagctgggatgatgggcgtccgcgccgtgcctgggtaaatttctgcatttttagtccagatggggtttcaccatgttgggcaggctggtcttgaactcctgacctcaggtgatccgcctgccttggctcccaaagtgctgggattacaggcgtgcaacccgcgcctggccccaaatgtcatgtttttaaataaaaacatagaaaatgatataaaggttcacagcatcatcaagaaaacagttcccccgtgtcgcggaggggagatg

SEQ ID NO: 20 - DNA, 529 bp, homo sapiens
  misc_feature (376)..(376): n is a, c, g, or t
  misc_feature (450)..(450): n is a, c, g, or t
  misc_feature (511)..(511): n is a, c, g, or t
ttttttgactagaaagggagcactttaatgaacagaagtacagacgtgctggcaaggatggaaatctccactggttcctggcccccttcacctccatgcatccccagcatgggtgttaatcattacccaagctctcgctgttccccctcaccccctgcagagtccagcaggtctagatacgtgctctttgaaatgtgttctgggattaaaaatggtgccctgaggctgtctaaccctcacaaaagacagacacatgcacacacgggccttggggagggctgtgtattagcagtcaggtgggccctcctgggagagcttgctcaagaactcttctcggaaggaaacccaccttaaggtagggttctgataggcagantcccagagggacagccagctgctagaagatggggttatccagggtttgtaaggtttaaacaacgggcagggagncaaacgagtcaaatggtttcctcgtgcgaattttggctcgaggcaaattcctatagtgagngtattaaatcgtaacatg

SEQ ID NO: 21 - DNA, 384 bp, homo sapiens
  misc_feature (15)..(15): n is a, c, g, or t
  misc_feature (18)..(18): n is a, c, g, or t
  misc_feature (95)..(95): n is a, c, g, or t
  misc_feature (256)..(256): n is a, c, g, or t
  misc_feature (271)..(271): n is a, c, g, or t
  misc_feature (298)..(298): n is a, c, g, or t
  misc_feature (322)..(322): n is a, c, g, or t
  misc_feature (356)..(356): n is a, c, g, or t
  misc_feature (375)..(375): n is a, c, g, or t
caagagtagattctnttnttcatttctcttttttttcttaaaaaaaaaagtattcatttggtataaaaaataaatattttaaatatgacattgantaaataaaaataatctgtcagtatgaaacatccccacagggtacattcatcaaagaggattttgtcacccaaggccatgtgcttttcagtggaagggaaggagggaaacctctaaggccgcacggtgggcccacggagctagcacgtgggcggggactganggctggatgcccggnttgagggtggggaactagagatgactntaagggcagggaacatctgtaccntctgcagggaaattgctaccctccccgggtgccngaggttccaccccacaaantttgtctac

SEQ ID NO: 22 - DNA, 367 bp, homo sapiens
tttgaggaatgagcaatttatttcaataaagagaaagcattaattttgctacagtgggaaaaaatgaactcaagagttgctacatttaactgtatccccatttatctctgcacgatgtcttatctcagtgtctcaattcacactaaaatattgaatgagaaatacaccacgttggctgattgcttgacatgtctgatttagggagacttctacaaccactcctctcttttttctcccagtaaatacttttgactttgacacctaccatattggaaatgacaggtgcccgagggcaagtgcatcaaagcagttaggattcgaatgcttgctaaggattatttttttaatggagcagttctattgaatc

SEQ ID NO: 23 - DNA, 445 bp, homo sapiens
  misc_feature (114)..(114): n is a, c, g, or t
  misc_feature (123)..(123): n is a, c, g, or t
  misc_feature (154)..(154): n is a, c, g, or t
  misc_feature (166)..(166): n is a, c, g, or t
  misc_feature (204)..(204): n is a, c, g, or t
  misc_feature (207)..(207): n is a, c, g, or t
  misc_feature (270)..(270): n is a, c, g, or t
  misc_feature (310)..(310): n is a, c, g, or t
  misc_feature (315)..(315): n is a, c, g, or t
  misc_feature (346)..(346): n is a, c, g, or t
  misc_feature (420)..(420): n is a, c, g, or t
ttctggttgtcaatgaggatatttattggggtttcatgagtgcagggagaagggctggatgacttgggatggggagagagacccctcccctgggatccctgcagctccagggtnccgtgggtngggttagagttgggaacctatgaacattctntaggggccactntcttctccacggtgctcccttcatgcgtgacctggcanctntagcttctgtgggacttccactgctcgggcgtcaggctcaggtagctgctggccgcgtacttnttgttgctctgtttggagggtttggtggtctccactcccnccttnacggggctgccatctgccttccagggcactntcacagctcccgggtagaagtcactgatcagacacactagtgtggccttgttggcttggagctcctcagagganggcgggaacagagttacagtgggga

SEQ ID NO: 24 - DNA, 226 bp, homo sapiens
ttttttttttttttttttttttaaatatttttcaaggttttattgcaaaccaaaatcagtttatcacacacaaaaaaagttgtgtgatgggatgagggaaggattgtacgtattataaccatgttaattacagtacattaaaatggtggtttacattacaaataagcctgtaagtttaaatatactagtgttataacccaatgtacagacgttctttatacaatac

SEQ ID NO: 25 - DNA, 498 bp, homo sapiens
aaactttatttactatttataaatacattgcaagacaaacttctcaaaaatacttttccccccaaaaagttaaaaaaataaagaaaagctaataggtaggcagaatgtcttgagacccctctgttttcaaggagagctctatgcagcgtgtgtccacaccgaggtctgcagcagggcagagtctccctgagcctgactttgccagaccttcttgggtttggcctccgggagagcagcccagtctctgggcgtgactcctttcctcagtcatggccacagttgtatcatatagcatctctaacatttcatctaggattatctagtatagatcttactatatttggggctatgttgtatcaatgttaacaagaacatatcttctctgcataaatgtgtgaattattaagaaaagatgagaaagactccaagttcaacaaacatgggtgaatctcaatgtgctcccatggcccgggaggggatcccggaaagccattcctc

SEQ ID NO: 26 - DNA, 551 bp, homo sapiens
gaatggacaataagcttttattgcattgaaaggtcattgcagtgaaaggttggggattgcttgctgctacagctgaatggattctattctgaccaatacacacagaaagagatcacagactccctaccttagaagaagggaggtggtagatgaaatgaactgtatgaagagccactagcctggcccacacacagaagaaggactggcccgtcttcttgaagcccatgctctggtagagggccatagcagagagctggatggtgccggtgtccaggataacttcactgtagccctggtcccgggcaaactgggaggacagtcctgaccagggcttttgctatcccctgacgacggtgctcactgtccacagagagatgaaacagctgcaaccgcttctccctcaaggtgggatcatcaacaggcagagctcctaccatgcccaccaccttctcttcagactcagcacccagaagcaggagccacgctcactcaggtaggattggtaatgtcagacatgtctgtgcacaatgtcatgtccaaatactccgtcc

SEQ ID NO: 27 - DNA, 428 bp, homo sapiens
  misc_feature (208)..(208): n is a, c, g, or t
  misc_feature (409)..(409): n is a, c, g, or t
tttttttttaccaaagagtcatccattttatttagtagcttatttttaacagacaaaaacaaaacaattcttacacaccttttttttcctagataaatttgacctggtttagtctttagtgcaatgaatggaaaaaacatccctaaatacttctgcatcagtagagttggccattactgagcctggagacccatgctaactttccagncaaaggtagtgtgttactgtacaagtgcaactaggttaggctaggcaaggaattaaaggaccaggggcaggcagccatgggagagggcacagtgtcctgggacttgtaggcaatagtataactgggctttctttctctggcttcagaaccttataggggaaactactgggatgattttattagggctgacagggggttggngggaataatgggggtgaag

SEQ ID NO: 28 - DNA, 377 bp, homo sapiens
  misc_feature (278)..(278): n is a, c, g, or t
  misc_feature (367)..(367): n is a, c, g, or t
  misc_feature (377)..(377): n is a, c, g, or t
ttatttattcttagtagttaaattcagtctaatggcagtgcttccatttacacgctaaaggcaaagcaattctcccactcaacatcatttgttgaattttagtttttggcaaatctcgtttctgtttgttcttgagggaaacattatagctcacattttttggttatttttatgaattcagaaaataagtgttgaatttatagaatggggacattcaagctggacccagaacgatcattaactcctagggcaggtaactggtaaattttcacatgggncacatctctcataggctccctggtttcacaatcaaaggaaatctaaaatcaccaactgggttacatatccactataaccggtatagggntattccagcn

SEQ ID NO: 29 - DNA, 381 bp, homo sapiens
  misc_feature (34)..(37): n is a, c, g, or t
  misc_feature (139)..(139): n is a, c, g, or t
  misc_feature (143)..(143): n is a, c, g, or t
  misc_feature (245)..(245): n is a, c, g, or t
  misc_feature (348)..(348): n is a, c, g, or t
  misc_feature (363)..(363): n is a, c, g, or t
caagcaaagccctacagacgctgcggctgagcannnntgtggacagggaggtggccgagatccggcagaggcatgaggcagagaaggccgcgggcttcatctccgtgctgaagctgttccggatgcgctcgctgcgtgngcantgctgtccatcatcgtcctcatgggcggccagcagctgtcgggcgtcaacgctatctactactacgcggaccagatctacctgagcgccggcgtgccgaggnaggcacgtgcagtacgtgacggccggcaccggggcctgaacgtggtcatgaccttctgcgccgtgttcgtgggtggagctcctggggtcggaggctgctgctnttgctggggtttttncatcttgcctcataagcc

SEQ ID NO: 30 - DNA, 283 bp, homo sapiens
  misc_feature (211)..(211): n is a, c, g, or t
  misc_feature (217)..(217): n is a, c, g, or t
  misc_feature (249)..(249): n is a, c, g, or t
  misc_feature (262)..(262): n is a, c, g, or t
tttttttttgagatcagaattaaattctttaatacaaaatgcttttttttttttaagatatatctgtatttctttgtcgttgtttaaaaataaatatgtactacggaatatctcgaaaaactgcactagagacaaagacgtgatgttaatatcttttccccacaattattacggataaacagtagcaccaataaataaatgataacaaatnttaaanttaaaaaaggagagagatttagtatgtagganttctctatttttncttgttttgtttttacatata

SEQ ID NO: 31 - DNA, 539 bp, homo sapiens
  misc_feature (461)..(461): n is a, c, g, or t
  misc_feature (515)..(515): n is a, c, g, or t
  misc_feature (523)..(523): n is a, c, g, or t
ttttttttaaacacaaagtctcatttatttttgtctgaagcacacaggagctcactcagcacaataacagtaagcgaatcatacaaatattgagaaaaaatgttcctatgaatacatacatgtatattcttaagagtagcgatcaggagtttaacaacaaatgtaaagtggttttctctaaagaatgctttctgacaggcttttgggttggaaatggacaggtaaatcactgtcacataacaggtaagctaagaataacttctgttacccaagtcatttgaaccctgtggactgtgaaagccctcttgggaatttacatttaattccatcattggtctggttgacttccacatttcactaaatttgggacaaggtccacaaagtaactcctcaactctcagtcttttcacactcaggtctgtggggaaggaaaggcagttgaggaccgggttttgaacacntgcacggagaccattgttagggtttttctaacagtatccctctgtttctggcanttccaagncatacccaaattgggt

SEQ ID NO: 32 - DNA, 354 bp, homo sapiens
  misc_feature (157)..(157): n is a, c, g, or t
  misc_feature (264)..(264): n is a, c, g, or t
  misc_feature (302)..(302): n is a, c, g, or t
  misc_feature (307)..(307): n is a, c, g, or t
  misc_feature (318)..(318): n is a, c, g, or t
tttggcagtgcttactttgttctcacagctatgatctaaggtctgtagatgccacacacaggtgaaacaatgtggtatttataatgtgtctgggtcagtgcctggcacatgggcaaatgcttaataaatggtagttcccctctgaccctgacagttncaagggtttggagtgacttgcggatgattctaatgtcccagccccacacacaagtcttcctgtatgggaggtcttctcctagggtaaaagaaagtaccacttgcttntcctttcatttccttctcaagctccagtttgatgcttnacttngtctatctgtnggaatatttatagggttatccactttacttcccaca

SEQ ID NO: 33 - DNA, 319 bp, homo sapiens
  misc_feature (249)..(249): n is a, c, g, or t
  misc_feature (294)..(294): n is a, c, g, or t
acggcttgggctggtacctcagccagatgcccttctcctggccacaccagctcacagtggagaagacccccgcgtatttcacgtcgcccaaagtgcctgagcgagtctacagcatgaacccgtccatccggctgctgctcatcctgcgagacccgtcggagcgcgtgctatctgactacacccaagtgttctacaaccacatgcagaagcacaagccctacccgtccatcgaggagttcctgggtgcgngatggcaggctcaatgtggactacaaggccctcaaccgcagcctnttaccacgtgcaacatgcagaactg

SEQ ID NO: 34 - DNA, 424 bp, homo sapiens
catcatccagaaatgggttttattctcagccgagggacagcaggactggtagaaactgtcaggccacacggctgcctgcacagcacccccatgcttggtagggggtgggagggatggcgggggctggctgtccacaggccgggcatgacaaggaggctcactggaggtggcacactttggagtgggatgtcgggggacagcgttctctggtagttgggccacaagactccacaaggatagcacagtgactgattcccagcgctagaggcgaggcggttggccatgtgtaggtgtgtatatatatgagtatttatagatattttatagaacagggcaagggcataccacagaagggggcacaaggtttttcaccaacggtccacacctggatggtatcagctcacccgctaccacaggattaagt

SEQ ID NO: 35 - DNA, 360 bp, homo sapiens
tttctgtaggatttttattggtggcacctggggccacatggagggagtcctcagcacaggcgctggggtgtgggaaatttcagaggcccctcctgggatgtcacccttcaggtcctcatgagtcaatcttgagtttctccttcactttctgaaatggctctggaaaaccactcccgcatcttggcagaaagttcactctgtttgatgcggctgatgagttcccgagccttgtcctccagtgtgtttccaaactccttcagcttatccaaggcactggagacgtctggggtcccctgggctggggctgggccttccaagacgatcgacagaaccaccaccaggaccgggagcgacaggaag

SEQ ID NO: 36 - DNA, 409 bp, homo sapiens
ttttttttttttttttttttttttgggtttgatgattttatttctcccttcccataaccagtaaaaaaaaaaaaaaaaattacaatcaggcctggtggtggctcacgcctgtgatctcagcactttgggaggctgaggtgggcggattgcttgatctcaggagtttgagaccagcctgagcaacacagcgagacctggtctcaaaattattatacaatcaatgcaagtacaaagattcaatttttaaaaatcaccagagtacaaagacggccacagcccctgcccgggtttaacttacatatatacagagtgggcggggcaggcatggccacagaggtggtattacaaaatatacaaagtggtttctttctttacatttcatagaagaagcctgcctcatttccaaatg

SEQ ID NO: 37 - DNA, 348 bp, homo sapiens
tttttttgctgaaagtggttactttattggttgggaaagggagaagctgtggtcagcccaagagggaatacagagtcccgaaaaaggggagggcaggtgggctggaaccagatgcagggccaggcagaaactttctctcctcactgctcagcctggtggtggctggagctcagaaattgggagtgacacaggacaccttcccacagccattgcggcacgatttcatctggccaggacactggctgtccacctggcactggtcccgacagaggccgagctggggaaagttaatgttcacctgggggcaggaaccctccttatcattgggcagagagcagaaggtggcac

SEQ ID NO: 38 - DNA, 460 bp, homo sapiens
  misc_feature (393)..(393): n is a, c, g, or t
  misc_feature (441)..(441): n is a, c, g, or t
cagtgtctgtaaagccaggtgaggaagtgatcccaaaagatgaaaatggaaaaatactatttgacacagtggatctctgtgccacgtgggaggccgtggagaagtgtaaagatgcaggattggccaagtccatcggggtgtccaacttcaaccgcaggcagctggagatgatcctcaacaagccagggctcaagtacaagcctgtctgcaaccagggtgggaatgtcatccttacttcaaccagagaaaactgctgggatttctgcaagtcaaaagacattgttctgggttgcctataggtgctctggggatcccaccgaggaaggaaccatggggtgggaccccgaactccccgggtgctcttgggggggccccgtccttttgtggccttgngaaaaaagcacaaggcggaccccagcccttgattgccctgcggtaccngctacagcttggggggttt

SEQ ID NO: 39 - DNA, 392 bp, homo sapiens
  misc_feature (165)..(165): n is a, c, g, or t
  misc_feature (263)..(263): n is a, c, g, or t
  misc_feature (273)..(273): n is a, c, g, or t
  misc_feature (381)..(381): n is a, c, g, or t
caaaaaagtggcctttattttccaatttctatagcaaaaccagccataagtgaacatggatgctcttcaatatttttccagtattaaatgaaaaaagacctctgccccagcccacatttcctttgttgaatgagtagagaagactgagaagtatcactcacccgngatgtggtttgtcccttttccagccagtgtgttggtaataaaagtcacctttcagagctttggtccctgtaatgcccgtctttcctgtgtccaggaanaacctttgcnactaggcagtcctctgaaagatttgtagaaggttaaagtggaaagggacttggaagctcatagaatccatgcctctttcttttagcatcaaggaattagaagtcccgngagatgaagaa

SEQ ID NO: 40 - DNA, 388 bp, homo sapiens
  misc_feature (171)..(171): n is a, c, g, or t
  misc_feature (313)..(313): n is a, c, g, or t
  misc_feature (321)..(321): n is a, c, g, or t
  misc_feature (354)..(354): n is a, c, g, or t
  misc_feature (359)..(359): n is a, c, g, or t
aatcttagatttttttttttttttaataaaccaaagataaactgaacatttaagacataatcagatttttagtgaatttttaagtcctccagaaaagtctatgacttaataaatattagcaagtttccaaaaatataacaaatgtttataaataccgtgtgcactgcagtnaattggtgtccccagagaaataaaatgcataacaaagcaaatgttatgttgtagtgtatgtatggcacatttataaatcattacatactttagggcacaaaaatgctgcagtactaaaagtgttgttcaagttctcaattcncggtaacnatttaaaatttcattaattcgggtttaatatcnatggntctccaaaaggctcccgtggccatattag

SEQ ID NO: 41 - DNA, 354 bp, homo sapiens
tttttttttttggggggtcctgagatctttatttctggatgttgctgtgtgttgggtataagatccagaacttgctaccagcctgaggagaaatcaaacacatggagaaaggaaagctgacagcccagagacccacggggaaacaggccccgagttactggatacaggcaaccctaaaactgactgtccctctggactctacgtagtgagccaacacatttcctcattattttggatatgtttttttcagttgaaggcattctgattcaatacaggtgaaacttttctttgcaaattacaaagtgtgataactgttgctaaagtttggaatgtgcttagagggagatcatgaac

SEQ ID NO: 42 - DNA, 515 bp, homo sapiens
ttatttcaaaatgataaaaatttattgtctttctggcctatggactcagctgtagttgactgaagtcgctaaacaggacggatttaagtagaggtgatatgtccagtcaccggcatagagacgtcctctgcgtcaccatccacacacagggcttctggtagacatcaggcaaagctctccatgttaatattcatctgaatatggataattagggtggctagcaaaactatcactgttaaaatagtggagatttctgtctaggccatctatggctttcatgtcctctgcagtcaactggaactcaaaaacctgcacgttctgtctgatgcgctgctcattgtagctcttggccaggaccacaaccccacgctgcagctggtagcgcagggcaatcagggctggggttcgcttgtgcttttttgccaaggcacaaaggactgggtctccaagagcaccggggagtcgggtcaccatcgtttgttcgttgagatccagagcatataggcaccagaaca

SEQ ID NO: 43 - DNA, 369 bp, homo sapiens
tttttttttgaccccaagcacagctttattgacaccccagccaacaccaacactctttccaaccagcggtgaggggcccatgggggcgggcctgaaggtggattgagggcctcggttttttgttgagtgatgacagctccatgttccttccagtggccctgcagcccctctatcccccagctttagccgctactcccagtggggcaggaggagcttccattgccatctggagaccctggcagggacttgcccatccgatccacacaccagcagggacctcggcgctgcccctgggaggagcggcactgctgttccggtagaagcctcgatggtcacaattgggcacgtagagtgtttgagcccctcggt

SEQ ID NO: 44 - DNA, 386 bp, homo sapiens
tttgtgtaaatctagcatttattgagtgtctgctttgtgctcagcactgctcaaacactgtgagcaaatacaaaagatttaagagactgggtacccacttcagagggtgaacatacagttggaatttccattcactccacagttagagaacagtagaaatgagtttctatcaggcatgctctgggagttcacggaggcccctggctctagttttgtgttgtcagggagatgttgatcaagcaccttggaagtgaaaaagcaatgtcctctacctgttccctggattcttctctctttagacctgtcaccttgaagaaagcatgatcgattccaaacatcactgtaggcaaatcaccatagtacttgaactgagttactgtgaagaa

SEQ ID NO: 45 - DNA, 437 bp, homo sapiens
  misc_feature (408)..(408): n is a, c, g, or t
tttttttttaaacgttaaacatcgtttttattcccagcacctaccattgtgccccccttataatagacagtaatggtatagtgaatgaatgaacaaatgaatgagttgagaaatccagaataatacatcacaagctacagcgaatttttcttgctagtgctcaggacaggtgaaatgaatcataacaggttggtgtctgtgaaaagctgacagagatgtgagaggtcccaccctgagggccaacaaagactctgcagctctgggcaggaaccactaaggctctcagctcctaggtcattcacatctttttcccttaaccctgccaaggtcaaccagatgagggagtgtctttcggggtggggtctgttgcccctctttgcccatggccgtcattgctgtaggggagtnagggcagtccatatggcttttaaggaccc

SEQ ID NO: 46 - DNA, 242 bp, homo sapiens
tttttcctgtgcacaggtcccatttattgtagaaaataataataattacagtgatgaatagctcttcttaaattacaaaacagaaaccacaaagaaggaagaggaaaaaccccaggacttccaagggtgaagctgtcccctcctccctgccaccctcccaggctcattagtgtccttggaaggggcagaggactcagaggggatcagtctccaggggccctgggctgaagcgggtgaggcag

SEQ ID NO: 47 - DNA, 278 bp, homo sapiens
cctgtgcttatactacaaggatctcatatgaatgcagtcctgattgttcgacacagcaagaaaattcactttcacagtcaacaagtcatcttactcagtagaacacaaagtaaatggtttataactccaatatttgcaaggaaaatacagtacaaattactaaaaaatactaaaatatagaattgtgttcaggcatctccactacatcaatcgcagcagtaacctgaaatttgagacttttaataaaaagttcttaaatataaattataatggcaaat

SEQ ID NO: 48 - DNA, 575 bp, homo sapiens
gctgtggaaacacagtggttgtcaaaccagcagagcaaactcctctcactgctctccacgtggcatctttaataaaagaggcagggtttcctcctggagtagtgaatattgttcctggttatgggcctacagcaggggcagccatttcttctcacatggatatagacaaagtagccttcacaggatcaacagaggttggcaagttgatcaaagaagctgccgggaaaagcaatctgaagagggtgaccctggagcttggaggaaagagcccttgcattgtgttagctgatgccgacttggacaatgctgttgaatttgcacaccatggggtattctaccaccagggccagtgttgtatagccgcatccaggatttttgtggaagaatcaatttatgatgagtttgttcgaggagtgttgagcgggctaagaagtatatccttggaaatccctctgacccaggagtcactcagggcctcagattgacaaggaacatatgataaaatacttgactcattgagagtgggaagaaagaaggggccaactgggatgtggagaagcccgtggggaataaag

SEQ ID NO: 49 - DNA, 485 bp, homo sapiens
  misc_feature (5)..(5): n is a, c, g, or t
  misc_feature (9)..(9): n is a, c, g, or t
  misc_feature (97)..(97): n is a, c, g, or t
  misc_feature (142)..(142): n is a, c, g, or t
  misc_feature (253)..(253): n is a, c, g, or t
  misc_feature (272)..(272): n is a, c, g, or t
  misc_feature (287)..(287): n is a, c, g, or t
  misc_feature (309)..(309): n is a, c, g, or t
  misc_feature (392)..(392): n is a, c, g, or t
  misc_feature (423)..(423): n is a, c, g, or t
tttantttngggaaaacatcttttttattattattatttttatttatttatttagagacaggttcttgttctgttgcctgggctagagtgcagtggngcaatcctaattcactgtggcctcaaattcctgggctcaagtgancctcctgccccacccttgagtagataggactacaggcacacaccaccatacctggggataatttttttatttttatttcgtaggaaacggagggtccagccaagttccccngggctgggtctcggaactnttgggccctcaaggngatccctcccatgcctgggggntggggaaaacaataacccttatggggggaaaggttcccctaaaaatggggttgaaggaaccaaggaatgaagggcctagggantatggaaagcctttaaattcctggattctgnccccttcctaggttggatattccctgaggccaaatattttcactggggggatttcctaaact

SEQ ID NO: 50 - DNA, 419 bp, homo sapiens
accaccaaaatgccagaatttattcaccaagtgagcatgggtaacatccatggatgagagtttaaacatctcttggttgctatggagggtccaagaagaaaacaaaatccattagtataaaggtttgtatttgctgtgacctctattgtcttgagagacagagtagacagaagaaataacaaatgtgaagtcctggaatatagatgagcttgtgatgaaagaggaacagagtgaaggtcagagctgttggaggaagaaagcaggaagggcaataaaggtccaagtggtagccagaggctcggtttattctagatgagaagggagatggtggagtcttttaagcaggagagaaacatgttctgagttacattttttaaaaatgtaattctgatttctttgtacaacattgattgtaggaa

SEQ ID NO: 51 - DNA, 388 bp, homo sapiens
ttttttctgttaaattttattatagtaacaaagtgactatttttaataataaaagcagagtgcctgtagaagttggatggccctatctcaggccaagtctccttagtgtttcagacctaggctgaccagaatagtcttctagaatgtaacatttatccaccaggtgtcattatttaccaatctgacaagccactgggctgtctccgtgcattcaatggttggaatcaaggctacagaccagaataggagatgaatgaaaatagatttagaaaagggcgttgtggctggaatgcagcttgcagtgtggagggcagggatgggagggtaaagagggctctttgaaagaccagtgtcactttcctgatcaagtttcttaagctgatacttc

SEQ ID NO: 52 - DNA, 416 bp, homo sapiens
ttccattagaagtattttattttaaagtacacttgaaattttaaatgtgtacaaattcagaggtttaaaaaacttcgaaagtcacagacacagaatttaggaagctgaaggctgagagtctcccttctcacttaatccatgctttattttgcattcctcacaggtaaggaggcagtgcctgttatgctgtggaccaaaaccagccccacggagctgatcttcaaaaaaatggaatttactctggcatactcctatgtatgatacctttccaaggccaaatcccaagagaccagcaactgtaaaagcaggttgggagagattagttgagaatcttctccattagttattttctagagctttaaaaatcaacgctggtaattttaaaattaaaaggaccacgctaaatcaatgaatga

SEQ ID NO: 53 - DNA, 329 bp, homo sapiens
  misc_feature (311)..(311): n is a, c, g, or t
gtgatatttttggcgttttattaaaaatggaaaaagttgttttagtgagcactcatggtgctttctcccctcctcccccaggcagaccccaaaagtgtcagggaaaggcaggccccctggaggggtgcggtggggctgaagcaggggctgctatggctaccagaggtgagctggtgatgtgagctgagttgtcacatgacactctccaccacgacgaccttgctgctctcggacactggggtcagggtggtcaggcccctgacatctgcgtcctgagctcggtactccaagtggtggaggccccagatggngctgggtcaggtgctgcc

SEQ ID NO: 54 - DNA, 412 bp, homo sapiens
cttacaaagaaaaatttaatattcgatgagaggttgaaccaggcttaaagcagacatactaggaaatggtgcagcctgtaagaatgccagtttgtaagtactgactttggaaaagatcatcgcctctatcagacacttagggtcctggtctggcaattttggcctgatgtgatgccacaagacccaacagagagagacacagagtccaggataatgttgacagtggtgtagccctttaggagaaatggcgctccctgcggctggtattaggttaccattggcaccgaagagaccaggaggataagaatatccataatttcagagctgccctggcacagtacctgccccgtcggaggctctcactggcaaatgacagctctgtgcaaggagcactcccaagtataaaaattat

SEQ ID NO: 55 - DNA, 489 bp, homo sapiens
tttcattaaagaatttaatagggagttgattatgttgtagaatcatatcgtcctattctgtgacacattagaaacataaactttagggctttttcatctccacagcatagaggtctgatcgcttctgtctaaaaacggggatttgctggcgtatttcagccagcttcttcaggtctatgtctgaatacacgattgcttcttctgtgccagctttggctagaacctccccccaagggttcaccacggtgctgtgtccccaggcaacataggaggctttgtcatcccgggcaggagaggctgtggcacatacacctgattatcaacagcccggcttcgctgaagtaactcccaatgggctggtccagtggtcagattaaaagctcctggatataccaacagctggcagcctctctgtgcgtagatttgtgcaagctctgcaaaccgcatgtcgtagcagatgcccagacccactctgcagtaagctgtttc

SEQ ID NO: 56 - DNA, 665 bp, homo sapiens
tttttttttttttttttttttttaaaaagaaataaaatgttttactcatttacacaaatacacacactgaagtccaccctgggagctggtaaaacaatttcagtctcagacccgtctgttttccagggtcctccgagcctgggcttcctcaagagcgtggcccaagggcgccacagcccagatccggcagccccaccaccttcactgaggaggctccgaagctccgttcccgctgctccttacagacaggggaggcagatatacacaaacgcgcctcggcccagcttggggctggcgggggaggctgtgtcttcaaacctttgcccccagttgggtcagtagaaccaccagtgtcctccccttctacctcccagctccactttggaggctgaggaagcgagaggttttctaggcagatttggagccctggagattgagttcacagtgtatgttctgggggcgctggtgcagtcagcggtccagtctccagcctgcagggttgcacactggggtggacgatgggtggccccgcagtgtacaacattgggttggcccggccctataccccagtgttctctttgattcagtccgaaacagagggagccttgtgtacacgcctggctttgttctctgagcgcacgtctccccagctaacaaaccggctt

SEQ ID NO: 57 - DNA, 244 bp, homo sapiens
  misc_feature (15)..(15): n is a, c, g, or t
  misc_feature (185)..(185): n is a, c, g, or t
  misc_feature (225)..(225): n is a, c, g, or t
  misc_feature (242)..(242): n is a, c, g, or t
aaaccatcagttttnccaatgtgaatggactggttcatatcacaccatatttagagatacaaggtgattataactaacgtgtctacaagacatactgggtcaaacaatgtgatcaatccaaagggtatctttttaaaaagaatttaagtactcagctgcaaagataagttcactaatgagatttnctttttttttttttttaaaaaaaaaaggtttttaatgagncaaatttattacaaaanct

SEQ ID NO: 58 - DNA, 387 bp, homo sapiens
  misc_feature (269)..(269): n is a, c, g, or t
  misc_feature (279)..(279): n is a, c, g, or t
  misc_feature (359)..(359): n is a, c, g, or t
  misc_feature (365)..(365): n is a, c, g, or t
acaatttgaattatgagagttcactttcagacgaagcacctaacaggaaatctctcaaacacagaaatgctggtttagccacaagatcaaaggaaaagattgattttgtatgtccgtgcagtttttgagagtgcgtctacacattttcgttttcacagcaatctttgtgtttgaagggagttctgatgtggaaacagcttgcagggttaaacctggatggcgcccctgtgatcagacattgctctgttgtaataaaagtgtcctcagtnctctttcccnctgatcctcctgcctgtacttctcctcgagttgctgtttctcagaatctgcacagtaaaatgtgccaatctggggctttnccgaanccggttcaaactgactgaaatc

SEQ ID NO: 59 - DNA, 262 bp, homo sapiens
ggatccgcgcctgtagtacaagacgttgctcatcagcagcttgagccccgcgctgcccgccgagcacctcgaggaccggctcttccaccagttcaagcgcttcggcgagatcagcctccgcctgtcgcacacgcctgagctgggccgtgtggctagtgtgaatttccggcacccacaggacgcacgcgaggcccgccagcacgccctggcccggcagctgctgctctacgaccgcccgctcaaggtagagcccgtgtacctg

SEQ ID NO: 60 - DNA, 480 bp, homo sapiens
ttatttttaaaactttattttaaaaatatgagcatctattttaaaagttttgataattattgccattattttcttgtgattggtacaatttaaaaataagtctatgttttcacattgattttaaaaaatatagcatgtttgaattacaaatgattaagcaaactctattacttcatagctgaccatcttccagaaaattcccacttaattgaatacttagaaaaaaatggccagtgcgagttgaaaggtatattaaaattaagggcagttttaattctgaagacaaatatcttcatggaaatctatttgtaagcttctgagattgctgctgaaagtctacagtctgtgaatataccaattcccctttacaactgatgcagatcattatgaaatactggaaggcataccctacaatttaggaattggtgtggctgccactgctatgctctcaattgcacactcatcagttcctctgcggat

SEQ ID NO: 61 - DNA, 425 bp, homo sapiens
  misc_feature (162)..(162): n is a, c, g, or t
  misc_feature (180)..(180): n is a, c, g, or t
  misc_feature (245)..(245): n is a, c, g, or t
  misc_feature (284)..(284): n is a, c, g, or t
  misc_feature (305)..(305): n is a, c, g, or t
  misc_feature (319)..(319): n is a, c, g, or t
  misc_feature (352)..(352): n is a, c, g, or t
  misc_feature (371)..(371): n is a, c, g, or t
  misc_feature (413)..(413): n is a, c, g, or t
  misc_feature (422)..(422): n is a, c, g, or t
ctctcaatgggcgcacgggctacgttctgcagcctgagagcatgaggacagagaaatatgacccgatgccacccgagtcccagaggaagatcctgatgacgctgacagtcaaggttctcggtgctcgccatctccccaaacttggacgaagtattgcctgtncctttgtagaagtggagntctgtggagccgagtatgacaacaacaagttcaagacgacggttgtgaatgataatggcctcagncctatctgggctccaacacaggagaaggtgacatttganatttatgacccaaacctgggnattttttgcgcttngtggtttattgaaggaaggtattgtttcagcgnttccccaattttttttggntcatggccactttacccctttaaaggcagtcaaaatcagggnttcagggtncct

SEQ ID NO: 62 - DNA, 293 bp, homo sapiens
  misc_feature (48)..(48): n is a, c, g, or t
  misc_feature (217)..(217): n is a, c, g, or t
  misc_feature (240)..(240): n is a, c, g, or t
  misc_feature (249)..(249): n is a, c, g, or t
  misc_feature (266)..(266): n is a, c, g, or t
  misc_feature (274)..(274): n is a, c, g, or t
  misc_feature (277)..(277): n is a, c, g, or t
tttttttttttttttttttttttttttagaattctgaattttattagngaatatatctaaaatacaatatttattaagttatgatatattgtctgaatggaaatatactctgtatcacaactctaattataacaatttttacagataatacttcatttatatctctgtaattcaaaagtcattaaattacaacagaattcatatttaagataacttngctataaatatataataattttnaaagttttnctttaatataacatctngaaatcangancatttatttttcctgg

SEQ ID NO: 63 - DNA, 528 bp, homo sapiens
ttttcttaccatttgctttatttttttttttcatttttcccaggtcaatgaggcagcaacattaacaaaaagtgagacatacttttttcttgcaagataattcaataattcttcccaaactgatgctccacagataatcctaagaggttttcattacatttagcctaatctggaagatctggcattctacatatcagaaataactcccaggctgatatgaggccaacccatgagcactcaattccacacaggggcaatacctcaagcagagagagggcttcaggccaccccacttctggctctttccagtcctagcaggtaaaagaggagatccaggctaaattttctggcccttcaggaaggctggcacctctggctctccctacctggggaacctccagggctactggatcagcagggactttgggggttgtttatggacccagaatttgtgcaagaagctccatgcttgctgcccaacaaactcctgaatgatctcagcctctctctccttttctgaacacactc

SEQ ID NO: 64 - DNA, 151 bp, homo sapiens
gaaacattcgtttccctttattagctcagtgaggctgatgtgtactgcacatttaaaaaaaatcacaggaattttcatacaatgaataaaaccacaacaatacatgtagaattggcaggtggaaaaaaggcccggcaaggtcgaactaatc

SEQ ID NO: 65 - DNA, 255 bp, homo sapiens
  misc_feature (167)..(167): n is a, c, g, or t
ttagaagaaataaaaatttgtctttatttaaaatgtggcaattgggaagtacagtacatgcttccctgtggcttgggggtgtgtagttggggccctaattcttgagccagtcaagagacacttgggatttagccctcaattgcagcactgaggcactggtgcgaagnaaacaatcctgagggggtccccaacccacctagtcactccttagtttgcagaggcactatctgcagagtcctgtgaaaggctgcagtg

SEQ ID NO: 66 - DNA, 311 bp, homo sapiens
  misc_feature (295)..(295): n is a, c, g, or t
gcttgtaattgctctatttattaatacatatatcacaaatgttcacaatatcaatgcattcttgttggcatgctagacagaggcattatttttgaagatcttttaaaaatattttgacttgttcccccttcacactcatttttaaattgtttggatcgaggtcctcaatgtctataatgtcaatgcaagaaaaaatacagagagaagtagtaaaataacacaatagcaattaattggggaaaaacaaaatatcatggccttcacaagaagcaacaacacagctttgtaacagggntaatacagggtttcca

SEQ ID NO: 67 - DNA, 268 bp, homo sapiens
  misc_feature (208)..(208): n is a, c, g, or t
tttttttttctctctgaagcatgtttttatttctctgtgatttggttttctactttggtacacatgagctgtggctgcatttcacacagaagctgacacatctcgcaggaatgccccataaaacagagcgcaaacaaatcacccagcaggttcgcttcacctgggctgttactgctgaactccctacttctaagagcacaggaagagnaacatcgctttgaatctacaggataagcgagggtggggcgagcagcagccaggggctccc

SEQ ID NO: 68 - DNA, 474 bp, homo sapiens
  misc_feature (3)..(3): n is a, c, g, or t
  misc_feature (10)..(10): n is a, c, g, or t
  misc_feature (39)..(39): n is a, c, g, or t
  misc_feature (416)..(416): n is a, c, g, or t
  misc_feature (424)..(424): n is a, c, g, or t
aangataagnaattattttatttccttggcctgatgganttgacttcattatacaagaacttgcagctgacagaactgacacacacatttcccccaagagaaagaacccttttcattagcagagatgaattgaaatgtcatgtctgagtgcaattcctgctccccactcccaccccacaaaatcccaaaagtgaaaataaatcaataaaatccccatgatttactaaaagtcatccctccaaacctttctaactagcagctgcagtgggatgataaccaaggaggggaagcagctggccatcatgtagcattcctgtgcatgtgagcctgaagggacagcagcatggggagcaagaatcctgaatgagagtaggtatataattaccttacttcatacttgccccctccctacatangacacctntgtcctgatacatgggaaaatactagagggagatgcttaggagtgggttt

SEQ ID NO: 69 - DNA, 489 bp, homo sapiens
  misc_feature (399)..(399): n is a, c, g, or t
  misc_feature (412)..(412): n is a, c, g, or t
  misc_feature (419)..(419): n is a, c, g, or t
  misc_feature (435)..(435): n is a, c, g, or t
  misc_feature (452)..(452): n is a, c, g, or t
tttttttttttttaggttttggaaaaattttattgcattttgtttccatgtggaagcactgacagaattgaaaagtggcagcatgttccacttacttttctgaaaaatcacatggctagattaactttcgccctacccaggacaggattgaataaaccttaactcctacccccaccccaagcaaaagctaaaaaagggggtttctggcaattgcttaaaaaacaaatcaatgtgtgagaattccccgatggtcaataatcatatttgttatttttgcacttggagggcactccctacctccttcacctctatccaccatcaccacctccttcaaacaagactgacacagggaagtgcctcttcaaatgggaaaatctatttctgtcccggtgccacagnttagggtgtgtcngtggggnttttgggccatggggntgggcctattgtccaanttttgaaagggttgggggtctttgagggtaccccagc

SEQ ID NO: 70 - DNA, 339 bp, homo sapiens
tttttcagaatattcaactttattttccattgacaaacacgacataaataacacacatttattaaatacacagactagccatgacttgaatgccagcaaaagtctaacgtacttttcatacgctcttttattttttgtctccacagtattgaagaccagcctttaaaacatactagaagatatatttaaatacactgacgataactacccataaaactttacatagaggtgataaaagagacttttccatttaatcaagtatatagagatggatgctgaggaggagaggtgaagaacactatgcttttgatactgatctttacaatatggattaaagtg

SEQ ID NO: 71 - DNA, 387 bp, homo sapiens
  misc_feature (6)..(6): n is a, c, g, or t
  misc_feature (8)..(8): n is a, c, g, or t
  misc_feature (75)..(75): n is a, c, g, or t
  misc_feature (139)..(139): n is a, c, g, or t
  misc_feature (202)..(202): n is a, c, g, or t
  misc_feature (282)..(282): n is a, c, g, or t
tttaantnctctcatctttatttttattaaaaaaaataaaacagtcaccaccaaccacatgacaactcgccaggnaaggcttgcttccctccctcctttgcgtcccatgtgcctagtcagcaaggtcggggaggcaccnatgttagcttcgcccaaagggagtattacagagagaggcttgggaaagggaaggaaacctggncaggcttttcagcactgagaaatcacttaaaactgatttgctttcagtaactggtatgtctgaaatgcagggagggaagnccatgctgtcagcaatcaacccactttttacaggttggctccagggagaggttggttgaaacggtgtttaaaggaagggagagtggtttcaccaggcttgctcaa

SEQ ID NO: 72 - DNA, 457 bp, homo sapiens
gtctatataaaatgtttatttttggaggactgtgtggtctggtgtttgggagggaactccacccccaccaggccaaccatggagctagaaacagagacagcaggaagggcaaagctggccactgcctgctccaccccttcacagcccagagcagaacagggtctgctctactctcaaggtgagtgacagagagccggtactgtttctgcccctggataccctgagaacccatgtgacttctgtagtgctcagcccctgtgcccttcctgggcctgatccacatgtgtcaacacacacactccctctcacagtctccaaacagcactgcagagcctagctgcatctgccaggttcaaagaggaatttttcacatttgctcacttccaatctccatcttccttcctctgtctcccactctcccactctcagtagccgcatcccagccctgccatactcc

SEQ ID NO: 73 - DNA, 384 bp, homo sapiens
  misc_feature (81)..(81): n is a, c, g, or t
  misc_feature (85)..(85): n is a, c, g, or t
  misc_feature (152)..(152): n is a, c, g, or t
ttaacacgtaacacaaaagcttttacttggaaactggcaaatactggactagaatactgacatgctcacgctctggcgggngtcnggatgcagaagctattgcacaaagcccctctgattgccttgctcctctttggcatgtatcagcagancccaagggcaattgcccacaggtggggactgttctccatcaaggtatggggacccctacttccttgttttgttaaaaagtgcaggtaggcgaagaagcccaggcagttgacccagtctttgaaacagctgactccccagcacccagtgtccactgggcagatgagaggtttgcacctataccagcccttgtttccttgggtaggggctcaagttgtcagtgtccagggtacc

SEQ ID NO: 74 - DNA, 442 bp, homo sapiens
  misc_feature (433)..(433): n is a, c, g, or t
tttttttttttaaaaagacatgatctttactggtgcttaaatgaacaaagaggtagctaaaaaaagccaccatttctctcaaatgtcatcaattacataagacctcaaaacacacactgatttgaaaaaaaatccatccgtattataaacagtgaagacagattaatgtcatctatttcatagtagcaggtcttccttgatatttgtaacaggcagaaatatttgattttactcttttgtcaccagagataattgccacatcacttgccaacatgatgaactcattttattaggtcaaatgttgaattccactcaagtgcacttaatataggtactacacattataagttgatcgaaattaaagaggtctccaattaggaaatggggatcttcaaaaatactatttactaattttccaggttgtatgtttccntggggttcc

SEQ ID NO: 75 - DNA, 326 bp, homo sapiens
  misc_feature (232)..(232): n is a, c, g, or t
  misc_feature (252)..(252): n is a, c, g, or t
  misc_feature (259)..(259): n is a, c, g, or t
  misc_feature (273)..(273): n is a, c, g, or t
  misc_feature (299)..(299): n is a, c, g, or t
tttttttataagtatgcaacagtcagccgggggaagataaaggtacattataaaacacacattaatgcatttaataaatatatattatctatcaaaagtgagccttagctcttcatcagttaataaaaagcacctgctgaggaactcctgtaaggctgggtatcatcattggcatcattgggttataaaagccacaatggctccctttcaacttggggtttgggcctgaggnggtttcaactcagccttggnccaaccngggaccaccacccngagttcacccttgtttcagtggggtnctgacgggcatctgggggtttaaaaaa

SEQ ID NO: 76 - DNA, 507 bp, homo sapiens
ttttttttttagaaaggatgtaaaatatttattaagggctttgctgcagaggacaacataaatagcattaagtcctcctgaaatgtaattagtgtacacatcaaccagttgataatttgtggtgggaaaggcaggaactcaagctgggaccaggttcccgcatccgaacttggacgagtgcgtggtgaaggctcggctccagggaccatgcctgcagctgctctctgccatcgcctctgcaaaagtctgttaggcaaatgcaaaagtgcaagcagaacttgcttgaagaacaaccacccccgaggcacagggtgcttaatccaccccttcaaatccttgagcattttccacggccatgagaagtttctctcgtaaatcttcaaaggtttcatatggaggtaagtcaaggcgattaaagcatgtgtgagctctgggcagtttctcaggactgccccattgctctattgtaaacagctgaggaacattggaaccataaaggtcggcaaa

SEQ ID NO: 77 - DNA, 530 bp, homo sapiens
  misc_feature (332)..(332): n is a, c, g, or t
cacacttacaaagttagaggcagtaatctatattagcgtgtgattaatcaaagagtacacttactaccatgaacttgggccctatgtcatagaattatttttgcctttcccccaaagaatcatttgctcttgaagtaataggctttttaaggcacattttaacaaaaacccatcatatacccagcttaaacatggaagctccaacctggttatagtaataaatatacctaagtaatgtgtgatttaccaaataggctagtgtctctagcttgaggataaagtcatattagaaaactgattcttcatttgcttattcaaagtgaaacaacatngtaaaaaatattagagaattagatttataacaataacccctaagtgtcaggtctgttggcaaaggtccaacaggatatagctctggaaatcagggagccctgggctctaaaccatccaggtttcggagtaggaatcatgaggaaaggagttagggcaccttaattatttttagaaatctcctttcaaatgcacagaac

SEQ ID NO: 78 - DNA, 463 bp, homo sapiens
  misc_feature (193)..(193): n is a, c, g, or t
  misc_feature (230)..(230): n is a, c, g, or t
  misc_feature (345)..(345): n is a, c, g, or t
  misc_feature (396)..(396): n is a, c, g, or t
  misc_feature (413)..(413): n is a, c, g, or t
  misc_feature (433)..(433): n is a, c, g, or t
  misc_feature (450)..(450): n is a, c, g, or t
  misc_feature (458)..(458): n is a, c, g, or t
ttttttttcttgatcaacatttttattttatttttttaggtgaagtagaacacaatagaatggctcaaaaatatcagaatgcactacgcacatcacgagtaaatactgtttggtaaaacttgtttcagttaaatatgtacgtgtccgtgcatgtcatgattaaatatccttcttaccacagtcaccctaaagnaaccaaagcttagggactagggacacaaccatgcagnaaagagcagggagaccagacactctggggttgaggatgatgaatttaatgccgcagccggacacccacatttcacactttgggcttcctttcagacaacttgatctttgggggantagaatttgttacaggggttcaaacaccacataggaaggcacgtggggccngccacacacagcattcntttttaggtgaggagggggncaggttacccttgtctncatggttncaagg

SEQ ID NO: 79 - DNA, 348 bp, homo sapiens
  misc_feature (3)..(3): n is a, c, g, or t
  misc_feature (5)..(5): n is a, c, g, or t
  misc_feature (160)..(160): n is a, c, g, or t
  misc_feature (336)..(336): n is a, c, g, or t
ttnanatgtttattacagatttattgggggaggcccaaggagaagacctatcatcatgtcacgggagctcacgttccataccaggaaaggagtgttcctgtcaccaggtgaagggggaagggtcctgggacccggcagtgggaggcctcggggaggggtntcatcagagtcttgaatggacccagacgctctcttcccgccaggacaggatgcgtaggagcagagaggaagcagctttgctggggaaccaccctggggtcgtttacttgaaccaaaggctcctgggggccagccagagggccaggggaggttaacacggtgcttcaggctttcttnttcttggggccc

SEQ ID NO: 80 - DNA, 439 bp, homo sapiens
tattttaatacagacaaaatagattcttttattttataaaaacgtaataaagtttgttattcaacaactgttatttattaattttgcctttgtatatgctgccagaaaagaaatattaagaaatcctgacttggtcatggtgaatcagaaggcctacctggatttttttatcactctaactgcgcagtagatcattcaacctcaaatttgttttttatgacactccaaggatgcccttagctgcatcactcctttgtcatcaaaagcttagaaataacaattaagcagattcctgagttactaaatgacacataactagaattgagacttaggaacttttagttccatgctaagcccacagggacacaacatctctaaaacattaatcataattgggcacaaatattttttgtcacgattccctcctgccctcatttgc

SEQ ID NO: 81 - DNA, 508 bp, homo sapiens
  misc_feature (302)..(302): n is a, c, g, or t
  misc_feature (420)..(420): n is a, c, g, or t
  misc_feature (466)..(466): n is a, c, g, or t
  misc_feature (485)..(485): n is a, c, g, or t
  misc_feature (494)..(494): n is a, c, g, or t
  misc_feature (506)..(506): n is a, c, g, or t
acctttttggattttattccagatcagtattttattttttttacatatattgaaatctcaaggtaaaaagttgaatacagttaagaccaaaggcttattcttagatttctgagcttgaaatatactattgcctattagaaaaccaaatggctataaaaggtatttatattttctttagatatttagacacttaataccatcttcagcattagagttatttaatgggttaggaataaaaatgcatgatctttgactttcttctctgggtgaagtacatttagaagactgctcctattggttcnataaatatgccaggggagctcatgtaagaataggtacttctcaatatgccagcattcatgcccatggtagtaattagtagtttaggtggataaactccaatggtatccgggtggggcncctgacacactcctcccggaataccggccctccctttggccatccnccaatgggcatgggcacancccccatangtcctaggtccncc

SEQ ID NO: 82 - DNA, 371 bp, homo sapiens
  misc_feature (1)..(4): n is a, c, g, or t
  misc_feature (187)..(187): n is a, c, g, or t
  misc_feature (205)..(205): n is a, c, g, or t
  misc_feature (270)..(270): n is a, c, g, or t
  misc_feature (317)..(317): n is a, c, g, or t
  misc_feature (322)..(322): n is a, c, g, or t
  misc_feature (360)..(360): n is a, c, g, or t
nnnnggagtttaccttgtttcagatgcagccatgggtaggtcagagatggactgttggtgcaataaacccaagaatcaatgtagcctcttaatcccatcaagatgtagtttgtagcagcaaagtgtacagtctgaaaccgtatgttttatccttatattttagagctttcagcagcctttttaaganaggccacttaccaaagtnatttctataagctcaagagtgtttcggttggtaagttcttccagctgaagccactttttccttanagttaatacaaatcgactatttttactttaaaaggcacagctgtccngggtngggaaatggaaacctgcagcagttcaggattgactaangaaagcaatta

SEQ ID NO: 83 - DNA, 449 bp, homo sapiens
cttattcaataaactcttttattctagtccacagatttttccattacaataataatgaaaatagcactagtaatttgtaacactgaggcccaaagggaaacccctcctcaaattataaggtaaatgacacaaagttgaacatagggtcagtgttgggcaaaaagcatttaaaatatagataacggggtcaagattttgtgtgtgtgcaaacactgggttttgtttttcaggatgacaccattttagaaagtgcatgattttgaaaactatatgtgtaattgtgacaaaactaaactgtagagaaaagacaaaatcaagcaaaaacaaaaaccaagaaaccaaaaggaagcaaatcaaatacaaggggcggatatgcaaacctccggtcctttggccctggaatggcaagtgagtgggcttcatagaaattctctgtagaaaggaatgtg

SEQ ID NO: 84 - DNA, 419 bp, homo sapiens
  misc_feature (395)..(395): n is a, c, g, or t
tttttgtttcttataaaatggaaaactttaattgtttaaagaaaaggcacaagtaaacatttcaggttatcatacaatgttacaataaaaaattccaatagcaaaatgaaacacattataactttgcttcttggtagtatactgaatcgtattattctatcatctcctctttggagtaaaaagaagggataggcagatcaatggatgtgatgtaaaaacttggatcataaatagcatccactatacctttaaccagaaattaaacttcagtagaattaaaattaatttttaaaacttagttttgttaataatagagcagcagtaactttcaagctaaaactcattgttttagtaagtaaataactgatttcatgaaatgttcgctgtcaatgtcncggtatggttaatatacattaatc

SEQ ID NO: 85 - DNA, 430 bp, homo sapiens
  misc_feature (250)..(250): n is a, c, g, or t
  misc_feature (423)..(423): n is a, c, g, or t
taactgttaatagtttttaagtaaagtgtacatacagctttaataacgattataatctgaagaaagccattcttcttatacaggatggaaaatcctcaaagcaacattttaaaccatggacactagagttgtcatacatctattcagagatgagagataaacagacatccttccatgtggaaacagacactcccatgtcaacaagtcccctaggatcagagagaaaagcagacccgtggtcaatcactanggtgtctctggtgtctcgctaaagatggagtcctatgtaggttggcctaagttggcctcagagggaggtggctgagcagcaaagcaagacagcatgtgtgtaaccagccaggcaaaataacaagtctgtgctacctggagtgtattttcaggaaaacaggaccatatggagtntggggca

SEQ ID NO: 86 - DNA, 388 bp, homo sapiens
  misc_feature (355)..(355): n is a, c, g, or t
gaatacataccatactttaataaccaagacaattcagctgtttttccagagtatatttcaaacagagttggcatataacccgtatgtaacaatattgctgtgattttagtcatatttaagggtccaaaatatgttcacaaaagaacagtttgtgaatgtcaaccagtttttgctttatattccttcaaaaacattccaccctggtcattcacactaatctacatcactgaaaataaccaaaataattcacagtctcacctctatgtaaaaattctaattgactcaacagggaaaggactgccctgctccttttgaggaaggaaacctgcaagcaagttctcaatccctaaaaccnagcaaaaatggttccagtgcagttgctgtagcc

SEQ ID NO: 87 - DNA, 282 bp, homo sapiens
tttttttttttttttttttggcaggccaaaaccctagtttatttcagcatcagcagtatcttagccatcaaaaaaataaactctaccaagggtgacggaagtctctacagcaaggctaagggctcgccagacgggaacatcaggggtgcatggtgggcactgccacggcaataagttaggaagcagcagggctggtgtcgggtgtgggccgggcttcatttctgggcaggcatgaggtcgtcgatggcctggccctgctccagccgctgttccatctcgatg

SEQ ID NO: 88 - DNA, 468 bp, homo sapiens
ttttaacatttacataatatatttagaatcacatggtttccagtgattagatttcagtcatgcctggaaaggagaagacagtggctaggagcacattccttataaaggatacataaatggtatacttaggatgactaatattaagaatttaaacacggtgcatttttttcctcaaaggaagcaattttagtttctaaagagcatttacttctgacatctcgattcctgatttcagtggctgcagactgtgtacttctgtgccacacttaggacaagtaaagtacacgtcaaataagaaactactcttagcacagaaataacagaaaatatgctcacatcctatggtgtgaggcatggtggggcactctccacatagagcggcttctttgccactggtggctaaatggattgttcaccaatagggtgcacccgtaagagggattacccccttgaggacaggttgggttt

SEQ ID NO: 89 - DNA, 648 bp, homo sapiens
tttttttttgtttttcttgggtggttatttttcttttctgtgtccttccccaacagcagttggaattttcttttgaacacaaagtaaattaatgtttatactgttttttcacctgagtcatgtaaaaggtgactcctttcattttaaaaagttatatttaatttttgggggccttaattaaaatttaacatttaaccatgtgttttttttttgtaaacagtctacatgtcaacaaatggataagggttaacaaaggcaaatactgacttcatttgtgttttaaacacgattatatgaatttttcttttttaattaaaaaaatgacataaaaccattcatataggtcctcttctctcaactgctttgagatatagctttaaatatgggtagatcaagacaagtaatgttggtaatctcttatcttgcatagaaaagaaaaaataaaggaacttatttccttcctaaggtctcagctagtttcttaagtcttttcttcagctccaatggaaatttctcatagcacttcttacagactggcttcatgtcaaactccacaaacttattcttgagtgttaatttagtgttgcaggtagaacaggcaaagcagttcacgcaccaggccttattaagagcagagaccacattccc

SEQ ID NO: 90 - DNA, 403 bp, homo sapiens
ggacaatcaaaatgatggtgttcttagaataaattaacatcagattgtgtttatattcagatagtctgatcctctcctttgaaatgcaatggagaccattgtgactgggggtgaatgcacacatttgttcttccatacagagactcattctttatatatactcaacggtaatttgaatcgttaggaatcctgagaaacactcacccctgggcacacacatgtacacagccccacggccaaccctccagaagctgggtttcccatggttcaattactagaagctcttttctcagaaggccaaacattcggaatatttagatgacactgtcccatctccccttgggaaaatcataaggtttcagtcggaggagctgaagtagcagcaatacatgtaggagattca

SEQ ID NO: 91 - DNA, 669 bp, homo sapiens
ttttttttttttatcttatcagcagaaaagttttattccttttgaggacaaacaattaaaccacatccaaggtcttaacttacagacagaaaccaaagtagccatttaaagcgttagatatcggatacaagacatacactggggagaatgcttcaccatctgaagctcacaccacaatggcccagtggacagctgtgcactctgcttgtgcttaagtgcctgggtgtggctgatgggaaggcgtgtctgcagaacagaagaacagctgtgtttcacaagtactgaagcattttagactgcatgtgggggtatatattttcatgttgaagggaagaggggaaatcagccaagtccctccccacagagcattaagctgccctgcagaagagccacggcagagaagcggacttctccctgctcaggcccggtaaattcctgcagaccttggaagcgtcctttcagcaggtgtcctctgaactggggccatggttcacccgaaaaggcattcgtccatcaaggtcatagagggtggccacccacttggttaacaggataaaaatggagattctccttgtcagctaaccggaattggctttctttggccacggtataaggggcgccttaaggccccaatttttaaaaaatttgccctgttctgagggaattttc

SEQ ID NO: 92 - DNA, 383 bp, homo sapiens
  misc_feature (147)..(147): n is a, c, g, or t
  misc_feature (309)..(309): n is a, c, g, or t
  misc_feature (349)..(349): n is a, c, g, or t
  misc_feature (365)..(365): n is a, c, g, or t
  misc_feature (372)..(372): n is a, c, g, or t
  misc_feature (380)..(380): n is a, c, g, or t
ggaacggaaaaggagaattcaagtgtgaccctcatgaggcaacgtgttatgatgatgggaagacataccacgtaggagaacagtggcagaaggaatatctcggtgccatttgctcctgcacatgctttggaggccagcggggctcgncttgtgacaactgccgcagacctggggggtgaacccagtcccgaaggcactactggccagtcctacaaccagtattcttcagagataccattcagagaacaaacactaatgtttaatttgcccaatttgagtgcttcatgccttttaggatgttacaggctngacagagaaggttttcccgaggagttaaatcatctttttnccatttcccgaggggncaaggcntgtttttnttt

SEQ ID NO: 93 - DNA, 447 bp, homo sapiens
tgcagacaaagtaaaatttattgagacagacagaaatgcacctactcaggactacagttaagcatttactattaaccaaagagttgtgttcacattccagataagtctacgtggaaaagcattcagaatttactaggtttttgctacatcactatttcatctacaatagggacaacaaactgacactcaggatttgatgggctctcattacaatgctatacatttaacaggaacaaacatcagtgactttgagaaaaagttataaaaagaccaaaaccacccactgtagaatgggctcttggatgttactgtacagcgtggtcaaggtaacaagaagaaaaaaatgtgagtggcatcctgggatgagccgggggacagacctggacagacacgttgtcatttgctgctgtgggtaggaaaatgggcgtaaaggaggagaaacagata

SEQ ID NO: 94 - DNA, 367 bp, homo sapiens
  misc_feature (145)..(145): n is a, c, g, or t
ggaagggcacctacaccgactgcgctatcaagaaggggctggagcagctcctcgtggggggctcccacctgaaggagaataagtacctgattgtggtgaccgacgggcacccctggagggctacaaggaaccctgtggggggctnggaggatgctgtgaacgaggccaagcacctgggcgtcaaagtcttctcggtggccatcacacccgaccacctggagccgcgtctgagcatcatcgccacggaccacacgtaccggcgcaacttcacggcggctgactggggccagagccgcgacgcagaggaaggccatcagccagaccatcgacaccattcgtggacatgattcaaaaattaacgtgggag

SEQ ID NO: 95 - DNA, 445 bp, homo sapiens
tacaaactgtcctttattcagagtgagactgcggaacattaataatttatcacgcggggagtccccagaagccctgtgcccacgaacccctgtgggcggaggagagaggcggggactccgggagcttcctgagagggccgtgtcttgggagcaaggtgacatattcagttcaggcacgcggaacatgaactcaggaagtggggagacagagagacccatcccccaactcccaggacgggggccaggcccctacaaaaggcacaatggcagggcaggtttggcagagtggttgagtgtcaggggtcgacaaaggacaccatgatgtagcgtgtgccccaggtcgttggcagcccctcgtggtagtgggtgaggcggccggggtgcaggagtgcccagcccttcctcggggaggagatcacacagtcgtagcgcaggaagcggcagc

SEQ ID NO: 96 - DNA, 235 bp, homo sapiens
tttttttcttagaacacctaaatatttatttggataaaataaaataacaagaatctggagaaaagaaactaagagccccaaagttaaagctggtaaaatagttcaagaacttgcagcaagtacctagaaaatattaaatggttaggacaaaacattcacagttcaaggtcccaagaaaatgatctggtgagcaaatacatatacacacttaaaactaatctggatgaattagtga

SEQ ID NO: 97 - DNA, 354 bp, homo sapiens
tgccttaacaaaaataatttattccacacacctcccaaggcagggggtagcgtgggaatcaagcatgtgtaaggcactgcccccgccagacccttctaacttctgcacactggaaggtgaaacctggagagagaagacactcccctccctagcttctacctggcaccctccaaagatgagcattcatcttggagaccaaaataaaaaaggacaaaagaccaggctcagagggagcagagctcaatggggggaagtgaaagcagccatcttctcctgcagctaagccagggcaaggcactagagacccacatccttcccatgccaccaactcgtcaggtcccaccaagcaagcca

SEQ ID NO: 98 - DNA, 574 bp, homo sapiens
  misc_feature (77)..(77): n is a, c, g, or t
  misc_feature (535)..(535): n is a, c, g, or t
  misc_feature (551)..(551): n is a, c, g, or t
ccgcggttaaggttttattttttggaggacgcgcggcaggggggccgggaaggggcgggggcagccgagcgaggcgnggcgctcactcccgcttccgtaggtggatgtagatgatgccgctgaccagggcgagggggaaggccacccaggccagggcgaacagtatccgaagctgccccctcgcgggtgcttctccaggatctcctcggcgtgaatggcatagatcaaggcgccagtaaacaccgccacgctggtgcaaagctggcagaggccggtggatagaagagacctcctcgtcgcatggtgtagagctggaacatgaacaggatgaaggagagacagcagagaatgagggagagcaccatgaggacctgcaccgccttcagccagccattctcgctgacattactgcaggcccatgttttggtgtcgttgttccacgtgcagtcgtaccagagattcagggactctttcccagggagagtccaccaggattgtcaaagtggcacgaaaagcatataagaatgaggatgtnaaaggtgagacaccanaagagagtacatgctgcattgaa

SEQ ID NO: 99 - DNA, 534 bp, homo sapiens
tttttttttttttttttttttttaggatgattgagtgtttctttaaaaataaaaaccccacaaaaaagccagaacaccctacccaacccagcccagtgtaacaggttagccattaacacagaataaagaaggtcccagccacacacgtcattactcggcagagggtgtccagcctggtcggccgacgtcacagtggatggccctgcgtggctgggacacagacagggagcaggcatggcacctgcgccacgcagagcagcaaggctgagcatgaccactggaaataaataaacatggtgccgacagcatctttaaattagtaagacgttagcacaaaacaaaaaagcacaacgactgaaaatgcacttgcttgttgtggtgggttgtgcttgaaacacctgaagccccaagtgggaaccgctggggacgtttgtcagtggaatttggagaaaaaggacggaaaaatcagttttctgagaaagtccctgcggtggccctggtcctgtgaattcagcacagcagatggggaggggg

SEQ ID NO: 100 - DNA, 410 bp, homo sapiens
  misc_feature (41)..(41): n is a, c, g, or t
  misc_feature (84)..(84): n is a, c, g, or t
  misc_feature (93)..(93): n is a, c, g, or t
  misc_feature (125)..(125): n is a, c, g, or t
  misc_feature (132)..(132): n is a, c, g, or t
  misc_feature (149)..(149): n is a, c, g, or t
  misc_feature (283)..(283): n is a, c, g, or t
  misc_feature (290)..(290): n is a, c, g, or t
  misc_feature (332)..(332): n is a, c, g, or t
  misc_feature (348)..(348): n is a, c, g, or t
tttttttttttttttttttttttttttttttttttttgaanatcgaagaagtacagatatttattatgaatcagtttaaacccntttgtgccnctgacaaagtaactttaaaaaattatactgancaaaggnctgatccagggtttaanatttcaaaaacacagataaatagtttactacagataaatagcttcaccctttggggtgctcccagaagcatctgaaaaatttctagagggggtctgttgaagatgtgtaactagtacaccccaacccccaaccncagtggnaaacaatgcccagggattaggctatggaagggcaaaatgggncccattcaaatttccncccagggaccaggccctattaaccccgggaaatgtccttagctggtgggggaaaggttggcg

SEQ ID NO: 101 - DNA, 412 bp, homo sapiens
  misc_feature (150)..(150): n is a, c, g, or t
gccataaagaatattatttaatccatgagacatcgtccctacaaagttagcgttacttttaaaaatgaagaccgtgatataaactggtaaaaaacgggcctgatgcgcctcgagcactccctgggagcaggccctggggtggctccgccnagtgtcgttctacctgaggtctacttgtgtctccccccttgttctctgcccccagaccatggccaaagcctttcccacaatgtcccatctgagagccttatggatgggctcacagggcagaggtaggaggagaaagaggaaggggcatggtgggcaccagccctggggcaactgagggcacagcacgtccccagcaaggcacgctcagtagtagtgggggaaaggcacacagaggcagcgctgaggactgggaagaaaggac

SEQ ID NO: 102 - DNA, 311 bp, homo sapiens
  misc_feature (11)..(11): n is a, c, g, or t
  misc_feature (63)..(63): n is a, c, g, or t
  misc_feature (66)..(66): n is a, c, g, or t
  misc_feature (83)..(83): n is a, c, g, or t
  misc_feature (96)..(97): n is a, c, g, or t
  misc_feature (142)..(142): n is a, c, g, or t
  misc_feature (151)..(151): n is a, c, g, or t
  misc_feature (155)..(155): n is a, c, g, or t
  misc_feature (168)..(168): n is a, c, g, or t
  misc_feature (185)..(185): n is a, c, g, or t
  misc_feature (192)..(192): n is a, c, g, or t
  misc_feature (195)..(195): n is a, c, g, or t
  misc_feature (258)..(258): n is a, c, g, or t
  misc_feature (276)..(276): n is a, c, g, or t
  misc_feature (284)..(284): n is a, c, g, or t
tgaagagaacnccattttattatggaaagttaaaaaaaaaaaaaaacaaaacaggcaattganaanggcggcacaatgggganggagaggtgaggnntctccttagccacccgacaccatctcaattcagttcaattgtganccactaggngaancagatttaaatanctatcagggggtacagngttaagngtnccagccttccctcttggggaaaactagggcaaagtaatactgagaaaaagtggaggaagccanaccttcaggtcactccantgaggagnctgggaggggacagagggagagatttc

SEQ ID NO: 103 - DNA, 448 bp, homo sapiens
tgaggagtgaaaacctttatttggaaaagtcagcaacatggatatggttcagaaaaaaacacagaaggagcaaaactaacatgaacatagaaagggggcctttgataaaacgtcgaacacatcactattctgaggaaggagaggtttgcgttgtttctagtaagacacagccctctgtggcaccaaggggctctcatgtccagtccaggccccagtctctgcgggagggaggagcagacggggttagcaccgttaatctcgagggtcttgagtgcagccagcgcccctgcgagtactctctgaggtcggggtcagtgctggtcagcagcggcctccagggctgtagggccaaggtccaggccggtcaccagcaggaccctcaggagacggggccgagtcgccgagatttatgtctgcaacggcctcctgaccttggttttcccaaaaa

SEQ ID NO: 104 - DNA, 456 bp, homo sapiens
tttaaggttggaattgcttttattgggggcggataccgcaagccccgcccacggtcaggttagtgttctgcccttgcagaggcgccagagcctgacacctccacctgccacccgcccggggtgtagtggaacatgcaaagctccgacggtggaggcaggggtggtcgctgctgagaccagggctgggtgcaacaggagggtcagcacagagcctggctggtgtccctgggcccaaaggggctggggctccatgggagagagacgggcaggcggcaccccagtgtggggctccacaagctggaggggcccctggacctaccaggaggacaggtctgcagttcccagccatgccggctggaacgtccgcctccccactgggtctgggtcctcggggcctggggttagaggccgacatggaaggacttactaggggaacagaggctggaggctgacgcc

SEQ ID NO: 105 - DNA, 359 bp, homo sapiens
cctgcccctctctgtccccggcattcattgacacgggctttccctggcctgtgatcccatcccaacacacacgacagaaaacagtgcaaaataataacacaaatgccaaatgtacacagtgtacaactctgaactgagaaagtgcaaggagaccacgggaatggaagtgggtaggggtcgggaggatgggcaccaggctggtgtcctgacagccacacctgggtgcaggccacgtgtcctcacggccaaggtaaccgggtgtctcaggcacttaataaatattaagggtgaccggtgactcaggctctgcctctgggaagtggcatcatttggtgaatgagtttggtctcggtgccacc

SEQ ID NO: 106 - DNA, 603 bp, homo sapiens
tttttttttttctccaaacttgaatcaataaatttattttctgcttaagcaggttgagttgggttttctatttgcaatagcaaaagtcctgactggcaaggtttaaaagtttgaagactctcacaggtaagtgcagctcaggatcctgtgagtggagcagaaagtcttaagaaatggcaggggctggttgaacccagattttccattggctgagcagatatccccagaggcgtagaaaattaaatttgttttatgttgttccaaaagaggagaactgaggccagaggagcacacttctgagacactcatttttgctgggtagaggaactctcctggccagcaggaccatcgatattagagcagctggcctcaggagggagtaagagccccatccctgaaggtacacaagttgtggcagcaaccatctggcctgcagtttccagaggggagtcaggcgtggggtgggactggagtgaacgggtagatgcttccacatgcggcagttggcactgacggcaggaacacgggggtggcttaatgggtcctggggctccctctggccctcaggaaggcaggagcatgaggggcttgggatgcagcacc

SEQ ID NO: 107 - DNA, 146 bp, homo sapiens
tggtggtggacggactgtaattgatagattgattatggaattaaattgggtacagcttcaaatcccgtcttctctgtggcactgggggttagagggggcactacaggctatgaatgtgggaaaagaggggctgagaggggttgggg

SEQ ID NO: 108 - DNA, 501 bp, homo sapiens
ggtggtaaaatttcaactttatttggccaatgtgttcaattcgattgtgaaatagaaatgcctgaagaactgtcagcgtctgattcagctccagcatccttggccacctccccacccgggagtcaagggtcgtggttctgccttgaacaggccacaggcgtgctgtagagaggccagtggtcacaatgagcccacgacaggaggaggagccctggcttgagggaaggggaaggcccaggcctgtgccgggacccagggctggcagccaccagctcctcttccaggcatgggggacaccctgacaggatccggaagtctccatttacccaaaaatgcaagagccatgatcagtcatggcgacactgcaggcggtactgagtgaccatgtccagtccggctccgtccctcccacacgggggacaagcttctccgaggaggcctggccaaggtggaacaaataccctgatgtcgaaaaattctaaaatccacagacggaatttt

SEQ ID NO: 109 - DNA, 475 bp, homo sapiens
  misc_feature (104)..(104): n is a, c, g, or t
  misc_feature (231)..(231): n is a, c, g, or t
  misc_feature (303)..(303): n is a, c, g, or t
  misc_feature (326)..(326): n is a, c, g, or t
  misc_feature (346)..(346): n is a, c, g, or t
  misc_feature (361)..(361): n is a, c, g, or t
  misc_feature (386)..(386): n is a, c, g, or t
  misc_feature (391)..(391): n is a, c, g, or t
  misc_feature (404)..(404): n is a, c, g, or t
  misc_feature (415)..(415): n is a, c, g, or t
  misc_feature (420)..(420): n is a, c, g, or t
  misc_feature (433)..(433): n is a, c, g, or t
  misc_feature (440)..(440): n is a, c, g, or t
tttttttttgagatggacaaatatctttatttacagcaacagatagaacagaccctccctcccttcccttcctttccccttccagtcttttccatactgttccncctcccgccccaccccaggctctcgcctagccctgccctctggggttcactgcgtgggttaggcccccaaaaaagcctaggaaaggagactggagagggctggctgagggtgggtggggcgtctctncacatttttctgtcctctaagcctggggtggaggagagaggcaggcaccaggagcagggagaggtagagagntacggccccaccggcccaccctncccaagtaactttcacagtnttccccagccctggntgccctttgcggcccctaccccagncctgnccctaggtttgtnctgttaggttntcagnaatttattgaacntggtaancaattaaagatttcaaggtttttttggccatgggg

SEQ ID NO: 110 - DNA, 435 bp, homo sapiens
  misc_feature (156)..(156): n is a, c, g, or t
  misc_feature (343)..(343): n is a, c, g, or t
ttttactttgaaattactttaatttagaaatagaaaacatcttgaaaggaaaaaaaaaaacccacaaaacatacaggcaaatttgtattctgtgagtttctcacaccctcacacttgttcaccaatctctaagatgaaaaactctcttccaaaatngtattcagccaccaacaatgatgttattaataggaatatgggatcaatttcacaaagaagccaatgaatcccattatagcaaatcctattgctgttgccatggaatcttctggaattcttttctatcaggtttagtgcatcttttaaccagccgaatggagtcccttacaaactggccggacttggntcaacaaactgcattacctgatccatggactggcctacccaaccggacacctaaaatggccaggggacacgtagcactggaggcctcgtgcc

SEQ ID NO: 111 - DNA, 618 bp, homo sapiens
  misc_feature (545)..(545): n is a, c, g, or t
agtcgggtccggcgtcctcctcatactctgtcagacaatctgactcctctccgtcagcacagccatcagagacatagctcgtggggggctcaatccgggacacaatctctgccaagtcagtgaagccagagcttgggaaggcaagcacgtctgcacggcggctctcattaaggtctgtagaccgccggtctgtgagcattttctcaatgacgttgccacggctccagcctccaaacaccgccttcccgtactggtagcccacatcatagatctggtcgaacttcccaaagtccatggtcttgaagcagtcgatgggcgggcgcaggtactcgcagtaggagctggacttgacaacctctagctgccgcacacaggacacgtaggccaggcgggactggatttcagccatgtctggaacctttaccttgtcagcccagggattcagccgcttccacagcagccaccagccggacaggtgttccccgtagtgctgaggtccgtctcatcctggctccccacgtcaatggcgatgaccgttttggcanccatgctgcgggcgatgtccgtggcagattgttgatgtagccgccatccatgagtaagtgccggtcttgggtc

SEQ ID NO: 112 - DNA, 442 bp, homo sapiens
  misc_feature (436)..(436): n is a, c, g, or t
taaatcaaggcctctttcattaccaaaacaaaacaaaaaaaagggaacaaaatacgatgggagagggaagagatgatgccgaagtgtcatcctgactgactgtccctgcagtgcccatgggtcccgtgccttattcattctcctctctcatttccacgatgtctgtcacctcctctgtcggaggcatgtctgtcatggcagagtcttccccctccgtggccgactcattctccatcttctttttctgcttccggtagacatagcacgcagcgatggcgaaccatggtggattctcccacaaagcccgccaggagggagcccacgcccagggtcgcaccgtgcacccccagggtagggtaggaccacgaggctgggcgatgagggacgatgatccgcagcacagagttgggggcaaggacgaaggtttttttcagtntcattt

SEQ ID NO: 113 - DNA, 316 bp, homo sapiens
  misc_feature (66)..(66): n is a, c, g, or t
  misc_feature (68)..(69): n is a, c, g, or t
  misc_feature (152)..(152): n is a, c, g, or t
  misc_feature (161)..(161): n is a, c, g, or t
  misc_feature (262)..(262): n is a, c, g, or t
aaataaagcgtttattgattagtagaagcatgaacagtgtgcataatattttcaatacaatatcangnngggatgatgggaacccctcaaaaggcactagaggcgcagatcttcgggacaagagggaagagatgcgccagagaccagggctngggcagctngggggtccctgagtgccaggcgccaccacacgtcctgtgggtcaaggcccctcctctggggagcaggtctacggcacggaggatgcagggctgggaggggnccccacctcggggacccaaaaggagtccatttctgccctgccccccgcaaagca

SEQ ID NO: 114 - DNA, 573 bp, homo sapiens
atatataatatatatatatacttttattattcacccgttaactccattatatgccaatcacgagctagttttcagcagttacattcccttgatcacggctgcatgaggatgtaattaactggaaaacacggagaccagagacacgaccggagtcgacgtcacgcagcccacgccatcgcaatacaattgtcaagttcgctggcggtttggtaaagccggttcagttctgctccctttgctagggattctcacgtgtgtgaaaattggagcaacagtggtggggttccatttcctggttcgaattttcagtggctttatctaaaatcgcactggtgactggttattgtagcaccagtccaaccttctctgcccccatgctgggcattttccaattgtaaaggtaatactgcaggttgccgtcccctatgccaaacttgagcttctccaggaaggttttgttctccatgagatccagtgcattgaacacatcaaaccctttcattttggcgaggacaagggcgtcgctcatgaggtctagaagaggggtctgggtgtgaacgttgtagaaagaat

SEQ ID NO: 115 - DNA, 352 bp, homo sapiens
ctccttcaggggcatttatttcccggtcagaaaagaagcagggacaggcgcctctgcctgagcctggcagacacaacacgaagaccggggatggggcgggggaggcacaggagacggctctcagcaatgtgtgcacttggtcccttgtttgttcctggctgggtcagggaaggcctgccgggggtggtggcactgagagcctgggggaacaggcgccaggccagtggccacgggacggcacggacggaggcaataaatactgatggccaggcggggctcctggctgggcccaggtggggtgggtgaggctgtccatcgagggctcttgggggggtgtgggctctgggcactg

SEQ ID NO: 116 - DNA, 390 bp, homo sapiens
tttttttttttttttttttttttaactggccgagtcaatattttattaaaaaacacacaaacacatgcacactggtaacaaaggcagagatggagaggagacacaagatctccttggggacaggctgaccacatagtgtttctacaggcacgcctcacttcaggaaagagggtatctctaagaccggactgacaagctagataaattaggacagggctttgtttcttaaggcacttcactcccctgaggagtgaagtagaacggatttaggcgggagtattcacaaaccccttcagctgtgctaagtggggttcatcagtacctgaggtggttctagaagcaggaaggcagaaaacatttccctggaggctgctttcctttcccagaatg

SEQ ID NO: 117 - DNA, 250 bp, homo sapiens
tttttcattttcaaaagggcttttattaaattctccccacacgatggctcctgcaatctgccacagctctggggcgtgtcctgtagggaaaggccctgttttccctgaggcggggctgggcttgtccatgggtccgcggactggccgtgcttggcgccctgggtagtgtctagctgcttcttgccgggcacagagctgcggggtctgggggcaccgggagctaagagcaggctctggtgcaggggtggag

SEQ ID NO: 118 - DNA, 421 bp, homo sapiens
caacatacgtttttattactcaaggacaacctggacgtcaccaatgcccagcttcacgggggcatgtagtgtgactcacggctgaacacaaaatcactgtgaagcctgtgctacagccctgggctacttttggacacgcaagaggacactcggttacatgaaacctgacttgcttctgaagacatgtgatacatgtcttttccctgaaaatgtttcccttccctgtctgccatgctcccaacttttctgccttccaggggcttctcactgtctgggtaactaggtcttgggcctagctagaccttgggtagtggcccctctgccacaatcagtgcctgggcctgaggctgagcttgtggcctccgaagcctgaactggctcggagctcgtctgtggcgcccagggatggcctggcttgcag

SEQ ID NO: 119 - DNA, 376 bp, homo sapiens
  misc_feature (146)..(146): n is a, c, g, or t
  misc_feature (220)..(220): n is a, c, g, or t
  misc_feature (226)..(226): n is a, c, g, or t
  misc_feature (250)..(250): n is a, c, g, or t
  misc_feature (265)..(265): n is a, c, g, or t
  misc_feature (274)..(274): n is a, c, g, or t
  misc_feature (311)..(311): n is a, c, g, or t
  misc_feature (325)..(325): n is a, c, g, or t
  misc_feature (334)..(334): n is a, c, g, or t
  misc_feature (343)..(343): n is a, c, g, or t
  misc_feature (352)..(352): n is a, c, g, or t
  misc_feature (366)..(366): n is a, c, g, or t
ttgctgcgacagtctctttatttccatctcagtctcccctgcctgctcattcctggggctccaggcccaatgctcagcagcagagagtttataaataaataaattacaaaagcgggcagggagtggcctggccagccctcccgggnctatggctcagtgctcagtgagtgacagctgcaggatccgctgtaagtcctcctcctcctgctgcccgcgccgntcccgntcctcctgctcccgtgaagacaantccaggggccagggngcagtgctnttcaaagctgggtggaccgggggctgggggtttcctngggaagggatcctngggcccctngggttcttntgggaaaancttgcaggcttttncttgggaagg

SEQ ID NO: 120 - DNA, 295 bp, homo sapiens
  misc_feature (11)..(11): n is a, c, g, or t
  misc_feature (14)..(15): n is a, c, g, or t
  misc_feature (17)..(17): n is a, c, g, or t
  misc_feature (121)..(121): n is a, c, g, or t
  misc_feature (154)..(154): n is a, c, g, or t
  misc_feature (160)..(160): n is a, c, g, or t
  misc_feature (195)..(195): n is a, c, g, or t
  misc_feature (241)..(241): n is a, c, g, or t
  misc_feature (248)..(248): n is a, c, g, or t
  misc_feature (278)..(278): n is a, c, g, or t
  misc_feature (289)..(289): n is a, c, g, or t
ttatgcaacantgnntnatgaagctgtattgattgccaggagggggtgagggtgaagcaggttccagctgtgaagtgcttgggcaggagaggggatcttccagtgggatctgtgtccacanggggggcctcctaggctgagcggggctgggcancctcanttcttggtgcgaaggacctgctcgtgggtggacancaccttgccatcgtgcacatccatgaccttggtgcggatttgggcngctggangaggtcacatctctggatgactgcgatccngaggagaactngggagg

SEQ ID NO: 121 - DNA, 237 bp, homo sapiens
ttttttttttttgccttttaaaacagcagctttaatgccccccagaatcagcaccatgtcatcacaggcttgggtcaaggggcgggtcagacgccagtcacatccgctcactgcccacagccacccccccacagtgagtcatctgccagggtggcaggagccacaatgggggtttgtccacaggggggaaggctagacccacgggaccaagtcactgaaataacggacgtgcacacg

SEQ ID NO: 122 - DNA, 619 bp, homo sapiens
  misc_feature (577)..(577): n is a, c, g, or t
tcctcgtcctcctcgggggcctaccgagcggctacggcgctcactgaccgcgtccgtacggcatgctggcgggcaacgagaagctaaccatgcagaacctcaacgaccgcctggcctcctacctggacaaggtgcgcgccctggagggcacaacgcgagcatagaggtgaagatccgcgactggtaccagaagcaggggcctgggctcaccgcgatctacagccactactacacgaccatccaggacctgcgggacaagattcttggtgccaccattgagaactccaggattgtcctgcagatcgacaatgcccgtctggctgcagatgacttccgaaccaagtttgagacggaacaggctctgcgcaatgagcgtggaggccgacatcaacggcatgcgcagggtgctggatgagctgaccctggccaggaccgacctggagatgcagatcgaaggcctgaaggaagagctggcctacctgaagaagaaccatgaggaggaaatcagtacgctgaggaggccagtgggagagcaggtcagtgtggaggtagattcgctccggcacgatctcgccanatcctgagtgacatgcacgcaatatgaggtctggccagcaga

SEQ ID NO: 123 - DNA, 603 bp, homo sapiens
  misc_feature (169)..(169): n is a, c, g, or t
  misc_feature (195)..(195): n is a, c, g, or t
  misc_feature (371)..(371): n is a, c, g, or t
  misc_feature (462)..(462): n is a, c, g, or t
  misc_feature (480)..(480): n is a, c, g, or t
aaaaagacatatttctattttatttccggatgtgattttccagcaggcaaataaatacaatggggagagggggaaggagggggatccttataaattagaaacaatctcaggtggggggaaggtgggtgggctggcaggggaggtggcaggcagggagcccactgctggncacagtgcctggctttgcaccctgtnccccaggctctgccagctcccctcagtggctggctcggttccggggtcataaggcgctgcggtgttggtggatccggcttgctgctgtctgagccagaagctcacaaggtcagtcactttgttttccaccagggcggcgacctgctgcaggcggcaggccagcttgcagctttctnggcccacagggtcctcctccagggcagtgataatctgatcatagtacctgtggatgtggttgtagagttcttgcatagcctccagacagtnggggagcagaagtgtagnttcccggagagctcagccaaagcagagtttcatctcctgggtaagctcgcccggagagctctggcgaaatgtccgcattagtacctcttcaacatctgcttgtagagtgggatttcccgggcg

SEQ ID NO: 124 - DNA, 358 bp, homo sapiens
caaattttcagtagttttattgaaaaatgcctcttttgtttcagaaataaataatataaggcagtgaaattcacaatctgcagttaaaatataaaagcagcaattctatgttcatagtcttgcaaatgttttccaactacttttgataactaagaaatattatattctgaaaaaagttcatactaaatatacaacacaaacatgcaattccctctctgcagaataatctgcaatttgggataaatgttagtgtgtctaaaacaaggaggtttaaggcaatatggaactgtatcccgttgatgcactaacttcatctacatggcttaaggtttgtggttgttaaagagatgtatacgag

SEQ ID NO: 125 - DNA, 350 bp, homo sapiens
gggccgctcgcaccgggcggcctgccagctcactctgagagatgtgggccccagggcggagaacaccaggcgggtgggcgtgtcgggcacaccagcagtcaggcgagagtcgtgggaggagacggaggtgagggtggagtagtccctgggcagtgtggttgagtgtgagtgttctgagcgggtcaatgagttgtagtcccgtgtgagggtggaggatgtgcttagcacgcggtggggcacgtgtgggctcaggtgggtgccatagcagcagcactggtcgtggtcatcctgtgcagggagttggtgctgcccgggagaggaaagtccatccggccattcaccaggtgctc

SEQ ID NO: 126 - DNA, 289 bp, homo sapiens
  misc_feature (278)..(278): n is a, c, g, or t
tttttaagagtaaatgagtttatcagatccttcctgagaacaggtttttcagagaaagggtaagtggttgcacacaaaaaggcacttagctcctggccatggcagccggccagggaagggaggggagaaccaagcagggagacggggcacagggaagacgcacggcagctccttctcccctggccagagcgggcctcagtggctgggagcaggccccagggacaaagatgggtgggtccaggcctcagagaagggggacatcatagacaaagaggcantttcttgggag

SEQ ID NO: 127 - DNA, 238 bp, homo sapiens
gatgagtaggtgagtttattgggacttacacacaggtcaatcctgggcggcgacaagacagctctagagatctgagcttcctcccaatgctaaactgctttcatgctaattttctgactgtttacttaccgggtaagagcgatgggactgttttcattggttggttctcacatactctctgggaagtttgggttctcagggacacctgctcctcagctggggaccatggccatggcca

SEQ ID NO: 128 - DNA, 469 bp, homo sapiens
ctctttacaacagcctttatttccggcccttgatcctgctcggatgctggtggaggcccttagctccgcccgccaggctctgtgccgcctccccgcaggcgcagattcatgaacacggtgctcaggggcttgaggccgtactcccccagcggagctggtcctccaggggcttcccctcgaaggtcagccagaacaggtcgtcctgcacaccctccagcccgctcacttgctgcttcaggtgggccacggtctgcgtcagcgcacctcgtaggtgctgctgcggcccttgttattcctcaccaggatgttcagaggttcgtcgcatttgtccaccaccagcaggaccgtgctgccggggcccaggcccatggctggcaaggggtgaccctgtcctgcagcgccacaccgctcgggtggacagccagacgctgctggaaggcgtgcagcaattcttctgggtgatctgcgc

SEQ ID NO: 129 - DNA, 464 bp, homo sapiens
tttttttgaattctgttttatatcaagctataaaaacctggatcctgttcaacatacatacaaaagcagtactctaaaaaataattattattatattaacaatatcaaacacgctaactcctacacacgtacaaagaccttgggcatcctttataccggccacttcctggccacagctttgtaaggcagtacctgggaaaaggggacagacccaagagagccggccccaaatcctgactcagcactgcagaggcatcagcgggcctgagtcatgcctgagatcgaagggccccctctcaggctgagaaggaactttcaggcccagggaggagcagagccttagggggagcacatgccgagcaggaaaacgagctcacattttcctggggtagagcgaggtgcccggcacgaggggatgaacggagggtgcggtgggcagaataacggcctcccaaagatgtcca

SEQ ID NO: 130 - DNA, 332 bp, homo sapiens
tttttttttggtacacgcactggcttgtttattagaaaaagtcttagagactcagtaaggcacgaagtccaggaagcgggcagggtcccctgggggacgttgaccaggaacaccagggcttcagtgccggatgccccactgtggtgggagttccccgctctctccagcagccccgctcccgtggagcctgaggacaagggagccctttcatccgagatgctgagtatgggcaacagggaggaggggaaggaagaggcagctccaccgtgtgggtgtggcggggggatggggctctgcaggagcctgatgctcctcggaccctgaaggcacta

SEQ ID NO: 131 - DNA, 393 bp, homo sapiens
  misc_feature (11)..(11): n is a, c, g, or t
  misc_feature (174)..(174): n is a, c, g, or t
  misc_feature (348)..(348): n is a, c, g, or t
ttttttttttnttttttttaaggattttaaaaatatatctattttgaaaatattctgaaagtaattaagatcacctattgggaaggaaagaaatcaacacaatgaaatttaggaagagaaatgcaaaagcagctgcagaatcctgccccttccaccccaaggggcacagccggnaggatgaagcttattttaggatcacaagtgcacgctctggtaggacggaggatgactttgtcagtcttctgggctgaagggccttgtccaaagtcaggatcagaaatagggtcagctcatcatgcttgggctttgttgggtcttggtagttaggataagggttcaagggctttntttttccatgaggggagagatttgggacacttcgcagggtttacg

SEQ ID NO: 132 - DNA, 473 bp, homo sapiens
  misc_feature (254)..(254): n is a, c, g, or t
  misc_feature (285)..(285): n is a, c, g, or t
  misc_feature (342)..(342): n is a, c, g, or t
  misc_feature (346)..(346): n is a, c, g, or t
  misc_feature (424)..(424): n is a, c, g, or t
  misc_feature (462)..(462): n is a, c, g, or t
  misc_feature (468)..(468): n is a, c, g, or t
tacagcaagaacgggtctgtttaatgacacagctgggtctggttacaaacatcagaaactagaaaaggaggacgggcggttgcacagatgaggatgaggatgaagatgaggatgaggatgggccaggaggggacacagcaggagccacagcagcaaaacatccttgaagacgacacacgtgaccaaggggcacacacggggggccccctgggcaagcctgacgcagatgaatagacagggccgactgccggcanggatggagggtggggtggggaaagccctcgncctcggagctgagggtgagacccaggcatgtggtcccgccgacctgctgcccagcancccnggattcccccggggctgcccttggtggccaaggcaggtggagcttagccggttcgaggtttctggactgaggcccctnccccagtgcggtcatcccacccagaacttcgctcttgnccctgnccatt

SEQ ID NO: 133 - DNA, 344 bp, homo sapiens
  misc_feature (195)..(196): n is a, c, g, or t
  misc_feature (198)..(198): n is a, c, g, or t
  misc_feature (226)..(226): n is a, c, g, or t
gagcaggagctgggcctttgagggccctgctccaaccccaagctgcatttatgatataacccatcacagctggattttaaaaatacacaaaaaaatatataatatacattataaaacctaggtggggtttggaggtggcctgagcgatatgcaaacagtgaggaccttcaggaagctcgggcagggtcgggatgnngnagggaaggggcacagtacttcatatganactcataaatacccacaggtggctgctggacaggcccagctggctctgggggcctgggtgtttaagaagggacagcaggttgaaggggttaaccttcaagtcccagaaactggggtct

SEQ ID NO: 134 - DNA, 310 bp, homo sapiens
ttttatcaaatgaatactttattagagacataacacgtataaaataaatttcttttcatcatggagttaccagattttaaaaccaaccaacactttctcatttttacagctaagacatgttaaattcttaaatgccataatttttgttcaactgctttgtcattcaactcacaagtctagaatgtgattaagctacaaatctaagtattcacagatgtgtcttaggcttggtttgtaacaatctagaagcaatctgtttacaaaagtgccaccaaagcattttaaagaaaccaatttaatgccaccaaac

SEQ ID NO: 135 - DNA, 403 bp, homo sapiens
catgttttaaaaaagtgacattgctttattactattggcaggtggggcctgcatgaggtggttagtgtgctcaggggatgggtgggctgtggagatgatgacagaaaggctggaaggaaagggggtgggtttgaaggccagggccaaggggtcctcaggtccgcttctgggaagggacagccttgaggaaggagtcatggcaagccatagctaggccaccaatcagattaagaaattctgagaaatctagctgaccatcactgttggtgtccagtttcttcatcatgcggtcaaggacaccagggtccttctggttctttgtgaaggcagctagttctgtattcatgaagcttaggaactctgtcttggagagagtgtagttataaccatcctttccagcata

SEQ ID NO: 136 - DNA, 465 bp, homo sapiens
  misc_feature (230)..(230): n is a, c, g, or t
  misc_feature (463)..(463): n is a, c, g, or t
tttttttctgtgcaaactacttttatttataaggaaagtttctctattttgtttataaacattaaaccagtgctgtgtgaaggcacttaattggggagaggtggggcagggatcctggtagagaccaatgtttcccacccagaccccaagactgctgggagagatggtgtcagcagtgactcccaggaatatccagtggtgtggtggcccatcccaggcccggctggcanggtggctggcttgctgggggatgtgatgatggtggtaggcatgggaggcactttggacgggatctgatttggcaaaaggaagtggtttcctgtccccagtgatttccagcccttcccagacctcccaaggctaaggcagattactaaatttaaggctggggcctccttcttccctggacttccacaaaaacggagaaccagcagtcctcggggctgctttgtctatggagtancc

SEQ ID NO: 137 - DNA, 461 bp, homo sapiens
tttttgcctttgtgcaacactttattgggaaagatttacacacggtgacctgtcataggccaagcgatgagaagagggcgccaggagccgtggggtcccgaggtggctcagatggaagccatgggacggccgtcccaggcccgcgcacccgcacctcagtttcccctttgtgaaatgggaagcttatgcttccttccaagtctgcaatattggtgcgatgagctaaaagtggagcgaaagacacaaggaagaggcttcccactcccaggacctgcccccaagctccgaccccacattgtggatgcaaagaaagggaatttgcccaaaacccactgcccaggggccccttccgttttggggaagtgcagtgctctctggatacccagaagctggagcaggggccagtgactcttgtctggacaatactttgattttgtaggagtggaggtggcctctgggca

SEQ ID NO: 138 - DNA, 442 bp, homo sapiens
  misc_feature (348)..(348): n is a, c, g, or t
cgtttaacaaaattgtttaataaaatttataaaaatgcatctttgagaatacttttctcagcttgaattgttttccttttccacccccaaagaaaatacacaattatcagcacccacacatgtatacactcaaaactacagtgacattctctacacagaactatattcgatatagcttgaactgccgaaaaatcaagacaattccaaaaagtgattgcagggttgatttttttctccaaaacactttgagaaacacgtaaagctatttcaacaaaagtcttttctttgattgtcaaaagttgaaattcacatttaaataaaaagagatccaaatcaagatcctcactnaccccctacccctcaactgaacccccttttagggccacattttcttcttgctcctaagaaaaaaatttggaattttgaatattctcggttttct

SEQ ID NO: 139 - DNA, 242 bp, homo sapiens; identical to SEQ ID NO: 46

SEQ ID NO: 140 - DNA, 337 bp, homo sapiens
gacattacttaaagtttaaaagggttttctatccactgtcaatttcaattggataacattttgtcaagtttttttttttcctgattatttgatgctagctggaattcaagaaatggcattgaccttattcaaataaagaaatattttagtaaatttgctttttccttcattgatcttggataataagttgccatttgtttttcagacacaacctgtattgtgatagcatttcatttatcacatgctttaggctctgcccgaggtggcctgctgcatgcagaggcagtacatggaagcatgccacgagaacatagaaatgggtcatggataactgttt

SEQ ID NO: 141 - DNA, 402 bp, homo sapiens
aatttggtctcagaatttttctggcagggtgacgtttcgaagaagccactgctgggaccgacttccattgcagtctctaatgctgggcacctggctatcctcttctgtggctttatccaggcactgattactgttcacatgctgcagggttaatttcactgggtcatactcccagagttggttgccttttaggtggtggcatttgagcattgtaactgggccattaagtttggaaacatccaagcaaaggtcatctgttctaatttctttgttggcagtataagagaaaacctggaaatttcctttaggatttggcagtggggaggaactttggaaattgttacatgctcacatgttggacatgtgtttcggaaagctacaccttacacgtttccgggaggc

SEQ ID NO: 142 - DNA, 443 bp, homo sapiens
ggacttcatttttttaatagatatagatatagatttatatttatatataaaatagttttttacaaaaaaatcaaccaaacaaaaaattaaaatcaacttaaaaaaacaacaaccaaacaacaataacaaaattcaaacaggagcagagatggggctgaggcataggggaggcccctagcgctgccctgaggaggagggggtgagaggctgaggcactcagtctcccttctgcttgggtgcttgccagtcccattggccagagcagtggggttgcctggggatgaggcatttggtgtctgggaggtgcctcgagaggtgtgtggggggcgcaggtaggtgctgaagagtttcccatagagtgggtcatggagggagaagttctggaactgacagagggagaggccttggctggatcctgcctggcacagctcagcatgcaaagc

SEQ ID NO: 143 - DNA, 376 bp, homo sapiens; identical to SEQ ID NO: 119
  misc_feature (146)..(146): n is a, c, g, or t
  misc_feature (220)..(220): n is a, c, g, or t
  misc_feature (226)..(226): n is a, c, g, or t
  misc_feature (250)..(250): n is a, c, g, or t
  misc_feature (265)..(265): n is a, c, g, or t
  misc_feature (274)..(274): n is a, c, g, or t
  misc_feature (311)..(311): n is a, c, g, or t
  misc_feature (325)..(325): n is a, c, g, or t
  misc_feature (334)..(334): n is a, c, g, or t
  misc_feature (343)..(343): n is a, c, g, or t
  misc_feature (352)..(352): n is a, c, g, or t
  misc_feature (366)..(366): n is a, c, g, or t

SEQ ID NO: 144 - DNA, 302 bp, homo sapiens
  misc_feature (42)..(42): n is a, c, g, or t
  misc_feature (48)..(48): n is a, c, g, or t
  misc_feature (197)..(197): n is a, c, g, or t
  misc_feature (255)..(255): n is a, c, g, or t
ttttaataatttcagaataaagtctcatttcagtgcagtggnctgggnggtgggggagagggttgaaagccccacttgggtccccgagggtccattgagccctctcaggccagctccaggaatcctggcctggtcacagagcagagttgcttgcagggtcctagtggccatcgggctggggcaggacatcatctctnaaagggtcagaggctcagagctggtgcagctcagcaggtcacggccctccaccagctntgggttctcccgcatcatgtggtggctgcttttcccccaccagggcc

SEQ ID NO: 145 - DNA, 446 bp, homo sapiens
ggcagacacttccatttaatgactaaaaatcacacatctcaggtcacgggtctaggagaaaacacacacacacacacacacacacacacacacacacacggattccccatcaaggggacatttgcagtttccaaaccttgaagatactgaagggaccagaaagttcctttgagtggctggtcacccaaagctcccggtcctccacccactgccctttggagggactcaaaccttgggaggagaaggctgagcttcctgtgggcccctcccacccacacctgagccagagagaagactgcagcaaagacatccaaagccaacgcaatgggaagcgtccgagatggcagaggagccagccctgtccttggctcacccagcttccaccatacaggaacccaagaccccagccttgcttccacagagaactggcaggggtcccctggcct

SEQ ID NO: 146 - DNA, 416 bp, homo sapiens
ttttttttaggtttccagccttttattcatacaaggactcaaaagaacacacgtcacccgctgacactgagcggtggggggaccttgtggaggaaggacacagcaggcttggccactgccctgaccagtgaccactcagggctgccccttccagagatgagcgtagggtggggtctgagcgccacccctaggccgtctgtgtgcagcgggagtgctgctgtcctggcgcccggcatcactgtgccagagtccccagcccaccctggcactggcagggttattatggggtggacttgcctgtgttgggggctcctgatcccaaaacatctaaagtcaggttccagagaacaagccatggggacctgaccagcaaccggggacctccgtccactgtgcgggacggtgatgaaaagcaa

SEQ ID NO: 147 - DNA, 437 bp, homo sapiens
gtatattaaacagtttatttcagtaacattgtaaggcaacaattaatcctcagtaagtcagcaaaccagtgacaagaaattgacaaacactccttctacagcttcctgagacagcaggctggcttgtggccccctgggtggtaacatcttaaggaatcctatcatgtttgtttatatatgctaaactgtaaaaacaaacacttcatgcgacaatcattcttaggtcaaacacaagaacgaactattttgaaatcaattcctcacactttttccctgaatatgcagtactgtactactaacatctaattctgtagaaaataatgcatttgttagtgactttgttagagcttgaaaagacccttttagaaattatttaaatgatcactctttaaaaattttttttaatctcagaatctactaatgtgacagacaaacgg

SEQ ID NO: 148 - DNA, 213 bp, homo sapiens
gcaaatgcaataatgccctcaccctcctgagaggagccccctccctgtggagcctgttacctccgcatttgacacgagtctgctgtgaaccccgcaacctcctccccacctcccatctctccttccaggcccatccctggcccagagcaggagggagggagggacgatggcggtgggtttttgtatctgaatttgctgtcttgaacataaaga

SEQ ID NO: 149 - DNA, 347 bp, homo sapiens
  misc_feature (2)..(3): n is a, c, g, or t
  misc_feature (10)..(10): n is a, c, g, or t
  misc_feature (15)..(15): n is a, c, g, or t
  misc_feature (172)..(172): n is a, c, g, or t
  misc_feature (213)..(213): n is a, c, g, or t
  misc_feature (240)..(240): n is a, c, g, or t
  misc_feature (269)..(269): n is a, c, g, or t
  misc_feature (292)..(292): n is a, c, g, or t
  misc_feature (301)..(301): n is a, c, g, or t
  misc_feature (322)..(322): n is a, c, g, or t
tnntggcaanaaacntttctcaggctttattgggctttatttgtgggagaagggggctggtcccaggtttttgcagtgcaaagccagggcgccacctgctggtagccctcaggtgtaggttcgaagctgctggggcccccgggggtttgggacacaggagaatttcaggctntgagtggagacagttactgccacgattccacaggcaagttnttcacctcaaagatctcctgcaccgantggtgaaagtggtcgtaggtgaggcgcanttttagccgcagggggggccttnttaggattnaggattctgaagagctgggtnataggaaggccaccccgagctggaa

SEQ ID NO: 150 - DNA, 234 bp, homo sapiens
  misc_feature (185)..(185): n is a, c, g, or t
  misc_feature (211)..(211): n is a, c, g, or t
  misc_feature (225)..(225): n is a, c, g, or t
tgcagttccaagatgatctgtattgtataacataagtgttctgttttccagttatttactgataaacttgcacataacattcttggttgtgacagcagcgtctgtaaactgtcagtctgattctcagcctcgggttcatctttgcataggtgttctgtctaatcacaattatggatgtttagggncttgctttggtccgttaagtgatgcnagtttaagtggtanaagtttaca

SEQ ID NO: 151 - DNA, 556 bp, homo sapiens
ttttttttgttctttggcattttatttcaaaattgcagcaaagacagagaaaaaaaaatcaacggcagcaccaggggtctggcctgagaacggagagatccggaatcggggccaaggtgtatccttgaccgcacgacaaggagtaatgggcggacctgaacccgcgacgaggggctgggggccaagatgcctgggtcggcccttacggctttgggagtgtcgcaaccacatgggggcgccagagacccagacgccgcccgctggccttttatttcgtattgcacttcaggtgagtcattggtagggaggcgagtgctggcgtgacgagatgctacgggtcggtggatctggagcacagcctgcagcttcacaccgggaacatccactcgtgggctctgattccgtactggatctccttcagctccttctggaagcggaggatcagctcaggcccattttcccaggtgggaaagtggaggttcctgtctttgtacaggattcggtgcactgggcaaacctggcaaacggtgcccgagccaaagacttcccggacgcg

SEQ ID NO: 152 - DNA, 440 bp, homo sapiens
ttttttagctgccacacgactttatttgtgaagcccccgggcacagcccagacacacacagagcacaaaggggaaagcatggggcagtcacgggtgctcagggaggtcatacagcatctgcccagtccagaccctaccgctcccctgccccaggaggtcctttaagagcagcgtccagatgcagctcggacattggggaccctgcctctccctccccagactggagaacagctttgggttgtcaacactccccctccagccaggccagtcacagacgacatctcagcagccaggagaaggcccactaggtccggggccagcgcagtcccagcagctcctgctcctggacaatctggtgtctgcctgtccacacggtgtggggcccagggttgccctctgccaacaaccccacgatccgacccccacagtcccacccatgg

SEQ ID NO: 153 - DNA, 429 bp, homo sapiens
tttttttttttccgtttatccaactggtgtttattctgcacttgctgttttctgaggtcttaacatgtgactggtactatgccaaacacttcatattccttcaacagatagcctgtaagctcctgctgtgtgacagacactgttcgaatttctaggaataccacaatgaacaaaacgcaaaaattcctgccccgctggaaaggagggccgacaaaacataaagcctcgctgatggcagaagtcccgcggggaaaaattaagtggggaaggggaaagggagcccaagggggctacaatgtggaatttctgtttcactctcacaactgctttgtgaggagtacataccactatgttacagaagaggacactgaggcacagagaggttgagtgagttgtataaggtcacgaaggtaatcggtgacagctggc

SEQ ID NO: 154 - DNA, 329 bp, homo sapiens
  misc_feature (270)..(270): n is a, c, g, or t
  misc_feature (308)..(308): n is a, c, g, or t
tttttttttttttcacagacagatgtggggccttttattatttggggttcctctatatggaacacgggacctccccaccccaagcctagtgcctctggacgcccataaccagtacacaagtccctgaagagtcccctttaaaatcactaatataaaaaaggagcgaaggagggaaggccgaccgcccacaggctgggcagctcctggttcggcagcagggccagggaaggacagagggggcgttggcttcggcgcaggaaggcacaggcnttcccagccccggggcctccccgagccgggaggtcttnccacacgcctgggactgcaga

SEQ ID NO: 155 - DNA, 475 bp, homo sapiens
  misc_feature (351)..(351): n is a, c, g, or t
  misc_feature (362)..(362): n is a, c, g, or t
  misc_feature (396)..(396): n is a, c, g, or t
  misc_feature (472)..(472): n is a, c, g, or t
gattagtcaaatatttttattttgccaaagaactctaaaagcctttggtgattcccaaacatacaatgaaccccaaataaaacaaaaccaaattgcactattacaaaggaacaagtccatgaaagtagagaggagtcgccagttaagggacagcaacttcaaggagacggttgttttttcgtttacatgttgggacactcccatttttctggtttccctgaataaacttcacacatactttgtcctgtctgaactgtaccaggaactcatcggaaatctcaatattgagcttctgtttggtttggctgagagttcgtcgcgatagagcttggtggccatttcaatcaggtngatcactgctngaagagaaagtctcctttactagctgcttctganccctctttgaggtggacggcgaagaagccatcattttgtgagctcattggataccttgggtcacatccaccagtgncct

SEQ ID NO: 156 - DNA, 353 bp, homo sapiens
  misc_feature (310)..(310): n is a, c, g, or t
  misc_feature (341)..(341): n is a, c, g, or t
aggcacacatttccattctttaagttacttcaaaagtctgggagctgtggcttgtccctgggcaagagggaacagaaagaggcaaccagtggctcccaaatgcacccctggatgtgcagaagctgtgtcagctgcttggttgtgattttgacctaacacagagctgcccagaccaggggtgaacaagtgatgtcagaagtttcaagccttgtgttgaatagcactgatgttatttaggtttaagtctttaagaaaaaggctccgctggcactcaaaagcccctgtttttcaaccacaaaaagccctggantgtcaaaggaaatcatggtgctagccactanacacttcaactt

SEQ ID NO: 157 - DNA, 259 bp, homo sapiens
gaaagggtcaaaaattttattagcaggactttttgtgtttttgaatatacaggtttcctgctgtccagggtaaaggggaagtggtgtcttgtggcccgaggtttggggcgcttgccttgggactccatccccatctctttcccgctagcgcacgtgggggaaggtgcctgcttgccggccccacggattcttcggctgtggcataaggcactgtgtgttctgcaggaaggcgctcatggctggctggtagatgagaggc

SEQ ID NO: 158 - DNA, 586 bp, homo sapiens
  misc_feature (174)..(174): n is a, c, g, or t
  misc_feature (451)..(451): n is a, c, g, or t
  misc_feature (483)..(483): n is a, c, g, or t
  misc_feature (500)..(500): n is a, c, g, or t
  misc_feature (561)..(561): n is a, c, g, or t
ttttttttcttataaactgaagttttattacaagcaggaacaaagaatactggcttaaataaaaggtaggtgggagccccctcctctagccagcttcttcctcacctcccagggccactgcagtgatggtcccagggccctgaggctggggtgaagctgtttctcccagagggnaccctctgtggctgccattcccagctgtctgtgaccactagcctctggagtgagaagggcaagatctggggacttcctatgtcactttccaagggcttcagccacttgaagggccaaggagggggatggtggaacaatatctattttgataagaaactacagctcccagcagaggagaaacatcctctgagtttccggcccagactcaggccaaccttcacttgcctcttggcccaccctgcaccttcttcttttctctggatggaggtcccgtttngcagaaacacttgtcttccagctctgggactnggtccatattagagctnagaggagggggttttgcttttaggattgcagccgttcccagagccattacccacccaccanggccaggttagcttttttggaaggt

SEQ ID NO: 159 - DNA, 487 bp, homo sapiens
  misc_feature (15)..(15): n is a, c, g, or t
  misc_feature (22)..(22): n is a, c, g, or t
  misc_feature (80)..(80): n is a, c, g, or t
  misc_feature (335)..(335): n is a, c, g, or t
  misc_feature (357)..(357): n is a, c, g, or t
  misc_feature (406)..(406): n is a, c, g, or t
  misc_feature (421)..(421): n is a, c, g, or t
  misc_feature (430)..(430): n is a, c, g, or t
  misc_feature (483)..(483): n is a, c, g, or t
tttgtttctgccgantggaatnggcctcagagcacaatggctttatttgtcactgaatggcggaccaggcctacagcccnagggaggaccccagtcacagggttgaaaggggtgcttgagccctttgtttccagaagagcagagaaaatctcatgatggcaggagagcaggcagcacttttccagcacactggccaaagccgatgcgggtaaccatccccctggcagtaccctgttatgatgacttcatccccgtccagcagaaacttcctggtctgaccattccccaggtctatgggcttcgttcccttccacgacagttccaacatggagccnaagttttctggctccggcccgntgatgggtcccagaagccagggaggtcccccggccgcaggttgcagccnttgacagagttggtnagtgagctnctgcagcattcgtccagtacatgtaatttaaaattggatttgcatatggtagncgct

SEQ ID NO: 160 - DNA, 309 bp, homo sapiens
tttttttgtaagaaatctgattattcaaatttattaccatcaagaattatgcaatgatgctgtagtttttcttaacaaatagaaaacagactgtgtacaacagtgaactctacagcactagcatccacaaggtaaaaatgaatgtttcatcatccaacattaccaaccctggaatgttgatcttgacttagcctagctaggtttggggacgtcggcaccacgtccctcagctaaaacagctatgcacccttccccgcccccacttacctatctagatagcgctgcccagaggaagaggcgctctccctg

SEQ ID NO: 161 - DNA, 615 bp, homo sapiens
  misc_feature (1)..(1): n is a, c, g, or t
  misc_feature (397)..(397): n is a, c, g, or t
  misc_feature (434)..(434): n is a, c, g, or t
  misc_feature (452)..(452): n is a, c, g, or t
  misc_feature (490)..(490): n is a, c, g, or t
  misc_feature (563)..(563): n is a, c, g, or t
ntttttaaagttggtctctgctttttattatcatgtgctgacaagtctaaacaatgtcaatgctaaaatatttcttcttgggcagaccattcctaccttctcggtaccacaccgtaccacaagtagcttacccattcctctagtgatagacatttgggttgtttccagcatgggtttattagaaagagcactgtagccgggcatggtggttcatgcctgttaagtgagctgaggtaaaatatattaatacatgaaatctatcattttaaccatttttatgtgtacaattcagtgcattaagtacattcacaatgttatgcaaccaccaccactctccatttccagaacatcttcatcatcccagagaatctgtttgcagcctcactccctattccanccttcccctagccctggcaacctctaccttcttggcnctgaaattggcctattcnagatgcctcatctaaatgggatcaaattggccctttgnggctggctaattcattaacaggtttcaaggtcatccacgtggagctggcacagacttatgcagcccaaaccanccctacggatcaatccccggagaaggggcaggccagcagatccctggcaccg

SEQ ID NO: 162 - DNA, 441 bp, homo sapiens
  misc_feature (47)..(47): n is a, c, g, or t
  misc_feature (351)..(351): n is a, c, g, or t
  misc_feature (374)..(374): n is a, c, g, or t
  misc_feature (417)..(417): n is a, c, g, or t
tttttttttttttagtttgatggcctttactctagtatttcttatcnttttcttgtgttcgttcttctcagtgccggctgaacaggtgactgaatctaaaggtcagtgctcgccttggggtcaaacaccctgatgcgggcagagttgcaggtcttgcagaggatgtgcccatccaaggggtagcagccttggttatctacttcagacaggagaccaccgcaatcctcgcatcggtagcagtgaacatggaaatctcgatccaaagccacaatacggacagtctcctcctggcccggggctggcataataggctccttgcacacaagaacatcgcggggcaaatttcttgtnggaagtcctcaatgcagtgaatnagcccgccagcattccacagtgaatggggattcccatccaggntgcggtggcacatcacgcaggtgc

SEQ ID NO: 163 - DNA, 326 bp, homo sapiens
ttttttttctttttttttttagaaataaataggtttattctaaaattaatccaaataattgaaattatagggaaggatattaagaagagaaaagattacaagacagaggaaagcataaaagaaaataaggtaattaaaacttcaaatcaggaaaaaggttctcaaaaatctgactttgcctacccaggtacagttggtggctatcaaattaggactcagtaattacttgtgtcactgagtgaaagctgctcattgctgccaagaacctacagagaaggccaaggggctgacgtacagctgtatggagcagcaataagcaccccaga

SEQ ID NO: 164 - DNA, 231 bp, homo sapiens
gtgttaaaaaaatttaataacaatgtaatcattatatctctgcaatcagctgaagttctaagaaaaaatgacaatgttgaaagttgtatcatcattattataaactttcatgttcagtatatgtaaactccaaagccaatttcaaaagatatttttgtgaaataccattctttaaaaaaaaggatattatatataactgtatgaatgttaaatgttttacagtactgattt

SEQ ID NO: 165 - DNA, 157 bp, homo sapiens
gagttctcattagactgggttctaggcgggctgctccactccataaggaagcactcgatgtcgtcatagaggctgttggcgctggacaggcagaggctgaggctgctgctatccagggaagacacaccctcacgctgcgtgccctctaggtgcactc

SEQ ID NO: 166 - DNA, 411 bp, homo sapiens
  misc_feature (395)..(395): n is a, c, g, or t
gtcaggccaagtaagtttattaacctgccaggcttctccaccagtcggaggtggcagccctgagcttacaaaatgaggggtttatatgggggagagagaccctggggttgttagtcaattaactttaccacatataatctcatgaccggcttacaatatattatcttatgaaaataggaatttacaagggggtgtaatccacgtttctcatgacctcccccgtgccacccagaggcttcggtgtagcaagtctggtgaccttgctatagcgcctagataacggttcaggaatgcagctgcagagtattcagggtaagggtcagctgcattgagttagcgggggcggagtggtcctggggcagcctgtccctaacagaatccacctccgagttgtnacaattaaatgaaaag

SEQ ID NO: 167 - DNA, 545 bp, homo sapiens
  misc_feature (350)..(350): n is a, c, g, or t
  misc_feature (513)..(513): n is a, c, g, or t
  misc_feature (520)..(520): n is a, c, g, or t
  misc_feature (538)..(538): n is a, c, g, or t
tacaaatgtataaaggttttggaatttatttgccaaaccaggtgcatgcaatttccacaataaggcaggctcaaaacaagccttaaaagcctttgatatgttttattaattagttcattctttttaaaatacatttataaaaggtatgagaacaagcagtagtgtttcttttcaaaagactggattccttatttttgcaattggctgctgcaaagccttaactctacattcaatgttctaactattctttgaacagatttatagactgtacttaaaaacactaatcctcagttcgggaatacctaatagatacaggaataggatatgcagtctggtagaatgtagatggnactgggactttgaaaaaaaaaaacctgcattctaattctggctttttactaacttggtgaatatgatctttgtctactcaattatttgatgccctgggtttccccattttaaccaagatagaagtaccataaagatgaagatggtattggccaaaattagttnaataacngcctaggtaaataagatnggggttg

SEQ ID NO: 168 - DNA, 454 bp, homo sapiens
actttgtgtgttgtgtcttattaacaccaaaatgtgccacatcatggtttagaagaggtggagggtgcaggcaggaggctccgaagtcccaggcaggcgcgcagcctctggcatctccatggactccagctggagagcctgtccgctcagcaacaccccaggcagcaccaagaataacatgcccacaagaacatcatggccaagagacgcacaggcgcatcccgcttccaggcacctttcccacctggccagaagtccctgctgtcatcccgacttgcacggtggttttggtaaccagtgggctgtgcaggagtgaaagtggggtcactttccttcctttcccagctgctggagtcggaactgctgcctttgtttggcggccttgtttcttaaatcagttccctcttaggatttattacactaaaaaaaaaattagtttttgaaaagaaatagg

SEQ ID NO: 169 - DNA, 375 bp, homo sapiens
tttaacagcagatagattctttatgttcaagacagcaaattcagatacaaaaacccaccgccatcgtccctccctccctcctgctctgggccagggatgggctggaaggagagatgggaggtggggaggaggttgcggggttcacagcagactcgtgtcaaatgcggaggtaacaggctccacagggagggggctcctctcaggaggggtgagggcattattgcatttgctggggggaaggacaaccctctcccctgtattccctgcgtcaggaaactaggaaggtcatgacccccaaacagaacccaaggccccagggagacagagggaccagtttggcagctgatggtggaaagtggtggaggcgggggtggc

SEQ ID NO: 170 - DNA, 396 bp, homo sapiens
  misc_feature (327)..(327): n is a, c, g, or t
  misc_feature (349)..(349): n is a, c, g, or t
  misc_feature (357)..(357): n is a, c, g, or t
  misc_feature (381)..(381): n is a, c, g, or t
gtatcacagaatattcagtccacaaattggcagacaatgagatttaagccccctcctccaaactcagacattggatggagagtagaatttcgacccatggaggtaagacacatgcatcagcaagaactgactcaaaagtactctttcgccagctgttcatcacccttctgatgctgctatgagaaggctcttatatataaaataaaaattaagtatgtgcatgggtaggcaagtcagtccaagttaaggagggttgatttctgagaatagatgtgggcaaagggcttccagacccagatggggaattagggagatgggcttggggantgacatgatctgagggaagggnctggggtncaggggaggagcatgtttgttgtnagtttggttcataac

SEQ ID NO: 171 - DNA, 386 bp, homo sapiens
  misc_feature (14)..(14): n is a, c, g, or t
  misc_feature (376)..(376): n is a, c, g, or t
ctcttgcaagttantcttacctcaatgtggctgacttgacttccctccgggccccactggacatccccatcccagaccctccacccaaggatgatgagatggaaacagataagcaggagaagaaagaagtccctaagtgtggatttctccctgggaatgagaaagtcctgtccctgcttgccctggttaagccagaagtctggactctcaaagagaaatgcattctggtgattacatggatccaacacctgatccccaagattgaagatggaaatgattttggggtagcaatccagggagaaggtgctggagagggtgaatgccgtcaagaccaaagtggaagcttttccagacaaccatttccaggtactttttnagaacgtggg

SEQ ID NO: 172 - DNA, 413 bp, homo sapiens
  misc_feature (39)..(39): n is a, c, g, or t
  misc_feature (162)..(163): n is a, c, g, or t
ccaaataacagttgggagaaatatcaatgaaattctggnggtgggggtggggttgaaagggtggggtgggagatatggaggagtatgaattagggcttggagttggtaaaaacattcctgactatccttcttaaccacgtggctgatgtggggtaggtatgnngggaaggaagtggagtagcctaatgaaaaggggttctagttgagctctgtagataaatgccttgtttcagtgtggttggagacctggtgtcagataaaagaaactccatccgcacagacagatgcaaacagctcctctagttctggcagagctaagttggagaactcaacattaatccattttaaaaagtactgtccttgaaatagatttgctgtgggaagaagggcagtgagtgtgggagaaaggagcc

SEQ ID NO: 173 - DNA, 393 bp, homo sapiens
tttttttcaggtagtgttttggtttattatcttagtgttgtcacagtgatagaaacccccagagtgggaagaagagctcctgcagggacctacattttgccattcccctctgccctggggctcagagccttgaagcctttgcttggcccttgcatgttaggatatggccaagaatcagaaactgatgcgtttttccagcactacctgtgtgctgcactcatggaaggtgggaagctatacacaggtatccaacttggttataagacaccagttcccacagggctggatttctcagctgtctggtaaaccagtggcacttcactgccccagggtggctggctccctttctgaatttctgtctcaatgtgatataattgccaccattcaggatgg

SEQ ID NO: 174 - DNA, 281 bp, homo sapiens
tacatttatttgcatgtttattggtttaacacaggggtcgcaaactcaaatgcccacaggggccaggttaggttagcggctgaagcagtctggggagaggcaaaaagcaatggcagggaggtgggacagaggaatgtgggccccaaactatgggggcagctgctactcagtgccagctgttcgtcgccatggggggaagcgggaccagagccgccgggtcttcggctttttcaagaggacgcataactccggattgttatttgaactgtcctgactttggt

SEQ ID NO: 175 - DNA, 493 bp, homo sapiens
ttaaacatttatttatctactgtacaaaatatttacatcatcagctgcaactgcctggccctttcacctggcctgacgaatctgcagcagggcttggtctctgccaattttccagaaacatgctgacactctcctaggtattcactcatgtctggtctccttcaaagacgctaaaaggccagaagggtagctggccccccaagtacctgggtcacaaggacataaataaaagaactggccaaaataagaaacactaatagaaaattgcccaagaaataacactctctcatctctttgacatattgtaccttttccccacactggctagtatgaaagcaggattagaaaaaaaaaacaaaacagtaaaagaaaaggcccaagagagcaaagatacttttgaatagagttcagacagagaatagaaaaccacaatagtgccaaagggttttgtttaacaaagactggtgcctaaggaccaccacagggatgcagc

SEQ ID NO: 176 - DNA, 286 bp, homo sapiens
gccaaactccagttaaactttatttgcaaacacagatggcggccacaatttgccacctgctggtgtagaacgtgtttttccacggttttgccaagaaatagtgtccaactgttaccaccatctcccttttttccccgattttcctgttggtggcttttaagtcccccatccctgctttgccatgagagcagggactcccagtgtccctggcgccctgcagcttccatagccattcggggtgtgcgtgggtgctctgctcccagctctgtgagctcgcaggtcgatg

SEQ ID NO: 177 - DNA, 724 bp, homo sapiens
  misc_feature (497)..(497): n is a, c, g, or t
  misc_feature (587)..(587): n is a, c, g, or t
  misc_feature (595)..(595): n is a, c, g, or t
cagaaaataattttgtaaactgtcacttcgcgggcagggaggatcgatgccacgtgggccccagctcacccgggtggaggctgggagctgaaaccgaacccaggcaggagatgggcgacggcggaggtgcaaggcagggcacggcgcacaagacgagggcggccgggcggggtggattagaggtcactctcgccgtacagcgccgtggagaaggacatgtagtccagagcacctggcacggagtcggggccggtgtagggggccatccgcgcgatgcagtactcagcctggtcgggtggcagctcgcggcgcacgtcgtccatggtaatgtagttcttgtccccagccaggatcttgaaggaagccatgacttggtctgctgtatctgtgtcggctgtctcgcgggacatgaagtcaatgaaggcctggaatgtcactacccccaggcggttggggtccacaatgctcatgatgcgggcaaattctgcttctcactnggggtcagttgcaatatcataacccaagctgatgaggcaggctttgagctcctcgggacacagtgtgaccgagttaatccggtcaaagtngttgaagngaggccgaacttcatcatctgctcctggctgatggcgttgcattcctggtcaagatctggtctcctactcattgagtgtcctggcaaagctgttagcaactgtcccagcccacacgattgtctcatggt

SEQ ID NO: 178 - DNA, 468 bp, homo sapiens
tgattcaagtatctgaaaacattctacaatggaaactgttattagatgctgcatgtactgtgctatggaccacgcacatacagccatgctgtctcagaagacttgaaatgccattgatagtttaaaaactctacacccgatggagaatcgaggaagacaatttaatgtttcatctgaatccagaggtgcatcaaattaaatgacagctccacttggcaaataatagctgttacttgatggtatccaagaagaaatggtgggtgatggataaattcagaaatgcttccccaaaggtgggtggtttttaaaaagtttcaggtcacaacccttgcagaaaacactgatgcccaacacactgattcgcggtccaggaaacacgggtcttccaagttccaaggggctggggttcccaacgatctagttcctgtgctgtaatcaatagggtcctttggactggatagggagcac

SEQ ID NO: 179 - DNA, 513 bp, homo sapiens
  misc_feature (433)..(433): n is a, c, g, or t
  misc_feature (453)..(453): n is a, c, g, or t
  misc_feature (470)..(470): n is a, c, g, or t
  misc_feature (487)..(487): n is a, c, g, or t
tttttttttttttttaaaccaaaaatattttattgactgagtcatcctggggttccataaaggaccccaagccttgcttggagtctatagctttgctaggactcccatgacatcaggatagagattgaggcacggggtcctttgggttccgattaaggaactatctactctgattctgttgatcttattagtccctccaggtcacctctacttcatctgtccgatacctctgtgtaaccccagaatcactgagtggggtcctgtgtccagcccgaaacatctcccagccagcctgggctatcatcgctccattgtcaatacagaatctctcatctgtagcaaaaagccgggctccacgttcctgggcacattgttgccatcatctcctgtagcctcacattacaccccactcctcccacaatgaggggcttcnggggagccacaatgtggccntgggtcggttttgtgantttttaccaggatttgnaaacacagtttcctgcagggagaaac

SEQ ID NO: 180 - DNA, 435 bp, homo sapiens
gtgtcaccctttgcctatatggtagagcaataatgctttttaaaaataaacttctgaaaacccaaggccaggtactgcattctgaatcagaatctcgcagtgtttctgtgaatagatttttttgtaaatatgacctttaagatattgtattatgtaaaatatgtatatacctttttttgtaggtcacaacaactcatttttacagagtttgtgaagctaaatatttaacattgttgatttcagtaagctgtgtggtgaggctaccagtggaagagacatcccttgacttttgtggcctgggggaggggtagtgctccacagcttttccttccccaccccccagcctagatgcctcgctcttttcaatctcttaatctaaatgcttttaaagagatattgtttagatgtagggcattttaattttttaaaaattcc

SEQ ID NO: 181 - DNA, 477 bp, homo sapiens
tttttttttttttttttacttgacaaatgcagagcaattaaattctttattataaaaatctcaaaaatgtccacctttactggagaccaatcttctaaaaggtcaaaagcaatcctgctgtttctctctgaaagctaaactcctttaaatgagaatacgagaatacccagaattttattcccagcctttgtgtggaaaaggcagtttgcattcttaggaaacatctaactgttacctaaaccataaatatttctatctactccattcaacccaattaaagaaaacaaaatgatgagaaaaataggagccgaacagaaagaaaattcacatcattttctactattacgaacattcaaatggtgcttcaaattaaataattttaattatcattctagccaagatcatactaagtaggatctcctgacagtcccatatggcagggatttaacctaaaacgtggcactgaatgcttcgcca

SEQ ID NO: 182 - DNA, 387 bp, homo sapiens
  misc_feature (153)..(153): n is a, c, g, or t
  misc_feature (170)..(170): n is a, c, g, or t
  misc_feature (266)..(266): n is a, c, g, or t
  misc_feature (373)..(373): n is a, c, g, or t
aagtgatattgcagagggtctgggggctgtacatgggcaggggcttggtgagctttgtacatggggctgggagacaagggagcctccaggtggaagggtattttttaataaaaaaaataatggagctacaaccaccccctcccccctccccgnttaaaaagacacaaaantagacgtctctgaggtaaacggggagcctggggcttaagggtgtttaaagggcttcacaggtgccagagcttagaggtgtcacaggcaccggggtngctcctgcatcagttggtagaacagcacgtagccctcgctggatgccacctgggttttcactgacaggggagacacgagagtcattgtagacatgccaaccagtctngcaccggcacaggg

SEQ ID NO: 183 - DNA, 362 bp, homo sapiens
  misc_feature (1)..(3): n is a, c, g, or t
  misc_feature (319)..(319): n is a, c, g, or t
  misc_feature (325)..(325): n is a, c, g, or t
  misc_feature (357)..(357): n is a, c, g, or t
nnnaacaggatttttaactcagacagtgtaaacatcatgacaattctggaatgtctgaagtttgagatagaagattgtctaagaaaagctgagattgtcttagctgtttgtggtatccgaattcctctggaacatgggcatcaggaaccaagcgatgccactgctactgggcagggtttttatattttacctaaacagagacaaatgacgctgacctaccttaatgaaatttcagaaaaaccatctgggaatcagccccatcatggtccagattggggaggtatctgggggatcaatggaaacatacccaggacctacnttttcnttccccccaaccccaatgtaatgggatggtcnaaggg

SEQ ID NO: 184 - DNA, 493 bp, homo sapiens
  misc_feature (46)..(46): n is a, c, g, or t
  misc_feature (164)..(164): n is a, c, g, or t
  misc_feature (290)..(290): n is a, c, g, or t
  misc_feature (299)..(299): n is a, c, g, or t
  misc_feature (468)..(468): n is a, c, g, or t
ggaccgaggactaccctgcactgccccacagcaagctgcccatggnccggggtcaagccaccacccacatgtcccaggagtccggccagcccaccacatccgctccctagctccggcgaggccaccccttctccaagcggcatgcgctccctgctgaggcagtncaggcagctggcttcggcaggccgtcagacccaggaggtgggcgcaggggtcatccaggatttgaggccctggccacacctgagtgacaatgatgtatttgaccccaccgggtcgcgcctccatgnccagcgcanctgaagctcagctgagagaggggccggcctcacctgcagccccttcagaaacgtgtctccattcgagcctgggggaaagcccgtgccacacagcagccacaaactcagccacagtgtcgtccagggtgaagatcacggcattggggcccgcgtcaaaggtgtacgccancttggtgtccccgtggtgggcgttt

SEQ ID NO: 185 - DNA, 451 bp, homo sapiens
ttttaaattaaacttcctttaatgaaataaaaaacaaatggtgcattgcataatatttgtggtcacagtataaaacaatacaattagttcatataacattggatatggacaaaaatacacaagatcctttctttgtctacggaaaattctgcagatccttatgtgccacacttaaaaagaaagtcaacgttttctcttctagggatctgcacacatatttatcactgagaatttggtcaaacagtggaggagaacttacccaaatcccagttcccttcttcctctgttgtcatcggtgaagctaaaaaaaagttttctgaaagtagcaagttgtgtagtattgcttattattcctgccaaaaaggctcagtctttggctcacagatgtcagtgacaaaatcatggctgcaggcagtctgcaaagcaagaagcaagggccaccggggaaaac

SEQ ID NO: 186 - DNA, 357 bp, homo sapiens
  misc_feature (133)..(134): n is a, c, g, or t
tttgtcactggacagcactttattgacaccctcggacccggggcagggtcagcaagactcccagctggcatcagactgtgtctggcctgctgtcgccatccctgaggggtgcaggacagagccccatagaggnnagaggcctccctgggaccagaggaggatgctgtgcaccaggcccatccccagcactcgaggcctaggaggagaggtgggctctggcagcgggtgtgaggtggcagtgagaagccaggccctcaggtgcagctcaggcctctgccgctggggcctcatagttgagcacgtagtagtcgtggacgtacatgaggacggctattggctgtccgatgatgagcgaca

SEQ ID NO: 187 - DNA, 447 bp, homo sapiens
tgcggccgcgatggtatctcccgagggctgcttggaccctggtgggctgagtgctccgaggaggggtggactccaccttggacagtgggatgtggtgttccacatgtgcctgtttccacgccagcaccttgacttggcagcatggagccaaggtctgtccccgcccaggagggtgccttcctcgggggtagggggacggcccactctgccccagggagtcccttttgatgggaagtgcagtcagcagcgtggaggtgtctgggccaccttcagaaggtggatgtggtggccgagaccccgtccacggagggtgatggcctttcccttctgcaggtgcgggcaggtgggcctgggaccggtgctggggcctctccttgctgtgactgcgttccagcggccagttcactacgcagtatctctggggcctgggaccagccacgtgccgag

SEQ ID NO: 188 - DNA, 370 bp, homo sapiens
  misc_feature (199)..(200): n is a, c, g, or t
  misc_feature (243)..(243): n is a, c, g, or t
  misc_feature (270)..(270): n is a, c, g, or t
  misc_feature (314)..(314): n is a, c, g, or t
  misc_feature (361)..(361): n is a, c, g, or t
aaactttatttattgtttcaagtggcaaaatgtcattggtctctgtggggtacctggcggggcagacggagacctggggtgaggcagggatacagtcccacccattataaaaatcaaaggcttttataaaaaatgctataaattggtatcaaaagaaaacccaagggaggctggaggaggaagcagagagggagagggnnggaggagaggaagggacaaaaccttcaaccactagtgatgaantccagggaagggaaggtttgggggganttcggagggtgatacaaagtgcataaatgtgcctccccagacgntcctcagaggtggaggggacagaggcttcagcctgggggcatgggtngggctccag

SEQ ID NO: 189 - DNA, 453 bp, homo sapiens
  misc_feature (2)..(2): n is a, c, g, or t
  misc_feature (252)..(252): n is a, c, g, or t
tntattgacctataacctgattagaatatgccagatgggaatcaatattgtacagaaagttgtacagaattttttacatagaaaactttacatctgtaccatatacattttgtccatctgaaaaaattttctacatccactgttaatacggaatgcttgacaatcttgtcttttaaccatcagagcacaattcacagtatgaatacatttccagtaaatctaacctccgcaaaccatgccagatttgttatnttaatatattcaacgttaaattctgtacatagagtaaaatctacatcaagccccaccacccaaaagaaaagaaaatgacagcaatctggattcattttgcagtgattcaagttttggtccataaggatcattctattttaatggctcatctttaaaagtcctaagagaaatatgtgacaggtagttactggcagtagggga

SEQ ID NO: 190 - DNA, 334 bp, homo sapiens
taaaaaaccagaccttttaatcaggaatgtggaattgaaaatgttccccaagtcccctttccacagtgtttggccagccctaacggaggcgccgggacgctggtgagccagggcctggtgagtaaacggccctgcctgccccagacagggagcatctggtggtggccagcctcctgcagcaaaggggtgccgggagggccaggggacatcatggggacttcctgggctttctgtaggaggccagtgctctggtcacatctgaggtcttcctgacaaggggacacagctgtgacacggtgagtatcctgggctgataggaaacccagctgggatg

SEQ ID NO: 191 - DNA, 426 bp, homo sapiens
tttttgcatagaacaagattttgttttcagagttttcttccttccccttcccccaattgttagcagcttgatgtgtcattctccccagcaggcaggcgggtggaatggcttgggttgtaaactccctcccccagccttcctgtcccttggaggggcagttcagctgggttctggttcagggtcaggcaggcagttaaggcttggctggtgcgagaaggctgggtgctgtgtcttcagagctcattcctccactctggctccacttgcagagacaggcccccttcaccctcccgctcctgggggaggtagtcatggctgtggggccctgaggtagaggggctgagcttgctcagacctttgcagtaaattctgtccctgttgcaggtccagtttggcaaggaagggaaacccgttataacccccgtt

SEQ ID NO: 192 - DNA, 420 bp, homo sapiens
ttttttttttttaagagtcaggttctcactgtgccaccaaggttgtagtgccgtggtgtaatcatggctcattgcagccttgaacttctgggctcaagtgatcctcccacctcaacctcctgagtagctgggaatacaggcatgcaccaccatgcctaattttttagagatggggtcttgctatattgcccagtctggcctcaagtaatcctcctgcctcagctttctgaattgctgggattatcggcatgagccactgtgcccagctaagctgtgacttttgaggcaaccccttcccttccacagagtttagtttcctcatttgtaaaatgaggacaaacctagatatttttgggaagtttcttccagttctaattgcctatgattcagatcacatctgttggcagagctttcctaaaa

SEQ ID NO: 193 - DNA, 319 bp, homo sapiens
  misc_feature (270)..(270): n is a, c, g, or t
  misc_feature (309)..(309): n is a, c, g, or t
ttttttttttttttttttttgcactcaatgaacaaatctttgttgtttattttaaaattcaagacaatttttttgcaaatgctgattcaaaacgtaccaatccccatctatcatgcctatgccaatacaatctgtcacaaaaaagtttgcttctcattgtcacatagctatggggactggtggccttctaaaatcactgtccagctgctgcaagtgtgaggccagcaacccacggcagggatgcaggagggaagccatggctaagctgtnggcctggacaaagggcacagatgggggttgaaaggtgangaagcggtaa

SEQ ID NO: 194 - DNA, 757 bp, Homo sapiens
  misc_feature (564)..(564): n is a, c, g, or t
atttgagcaatttatttttttttcaaagaaatccatgcaaagagagaacgatagaaagggagggagtgagagagaaagacatggtaaccatgttctagcagccaaacataggagaataatttggcacaacttgatggttttttttctttctttgcaaaaggacaatctatatgctaccactaaaatgtatcttcctccaaaagataccatttgattttcgaaaacataacacatggttagtcctctacttcatggctggaggaggtatacaggataacaaaaaaaaaaaaatagaaaaaaataagaaagtggttccctttatcgaggaagaccacagggtgctgtagggcagcacatgtgctgggcaccaggcagtcagtgcaccaggaagaagaagcacaccaccgagatggccatgctggtgagaagcttcaggggggaatgaacgttcccgaggttgtgaaaggtgcttatctcgttgtccttcggagttgcctgctgactgtttccaggcgcatcatccacatccagatcataggccagttcctgcaggaagcggctganttcttcacttttatcattccatcaccagagcctccaatgcactcatcttcatcatcacggcagtctccacttttcaacccttcctcatccaggttttatccagaactctacctttgggcatagacatggttctcaggagctggttaatggtgctcaagttgtcaatattttgactgaccactggtcagggccc

SEQ ID NO: 195 - DNA, 440 bp, Homo sapiens
  misc_feature (105)..(105): n is a, c, g, or t
  misc_feature (276)..(276): n is a, c, g, or t
  misc_feature (287)..(287): n is a, c, g, or t
  misc_feature (317)..(317): n is a, c, g, or t
  misc_feature (330)..(330): n is a, c, g, or t
  misc_feature (365)..(365): n is a, c, g, or t
  misc_feature (370)..(370): n is a, c, g, or t
  misc_feature (376)..(376): n is a, c, g, or t
  misc_feature (385)..(385): n is a, c, g, or t
ttagccaattgattttttttggtggttgttttttttaaagccaatttctgagcttttgtggggtgtttctaaaaagccaattagttttaagagggttgttgtggnggggggggaagggggttagtttaatgttttgattttttatgtgtggggataattggggataatttggggggagggtatgtgaagggtgtttaaagccaatcgattttgtacatgtttgaagatgctgctgtgcttcctcagcccgatggagggggccgaggagagtagccngtttcggggangcggggcacgggggactgggtcaggagaanccccagggggacngtgggaaccgagagattttccgggatgggaacctngattngaaacngtccgtcgnccagcgaaggaggctgcaggatggtggcgccggggctgcagacttgcggcagttt

SEQ ID NO: 196 - protein, 406 aa, homo sapiens
MSGAPTAGAALMLCAATAVLLSAQGGPVQSKSPRFASWDEMNVLAHGLLQLGQGLREHAERTRSQLSALERRLSACGSACQGTEGSTDLPLAPESRVDPEVLHSLQTQLKAQNSRIQQLFHKVAQQQRHLEKQHLRIQHLQSQFGLLDHKHLDHEVAKPARRKRLPEMAQPVDPAHNVSRLHRLPRDCQELFQVGERQSGLFEIQPQGSPPFLVNCKMTSDGGWTVIQRRHDGSVDFNRPWEAYKAGFGDPHGEFWLGLEKVHSITGDRNSRLAVQLRDWDGNAELLQFSVHLGGEDTAYSLQLTAPVAGQLGATTVPPSGLSVPFSTWDQDHDLRRDKNCAKSLSGGWWFGTCSHSNLNGQYFRSIPQQRQKLKKGIFWKTWRGRYYPLQATTMLIQPMAAEAAS

SEQ ID NO: 197 - protein, 173 aa, homo sapiens
MDVTIQHPWFKRTLGPFYPSRLFDQFFGEGLFEYDLLPFLSSTISPYYRQSLFRTVLDSGISEVRSDRDKFVIFLDVKHFSPEDLTVKVQDDFVEIHGKHNERQDDHGYISREFHRRYRLPSNVDQSALSCSLSADGMLTFCGPKIQTGLDATHAERAIPVSREEKPTSAPSS

SEQ ID NO: 198 - protein, 222 aa, homo sapiens
MAEKPKLHYSNIRGRMESIRWLLAAAGVEFEEKFIKSAEDLDKLRNDGYLMFQQVPMVEIDGMKLVQTRAILNYIASKYNLYGKDIKEKALIDMYIEGIADLGEMILLLPFSQPEEQDAKLALIQEKTKNRYFPAFEKVLKSHGQDYLVGNKLSRADIHLVELLYYVEELDSSLISSFPLLKALKTRISNLPTVKKFLQPGSPRKPPMDEKSLEESRKIFRF

SEQ ID NO: 199 - protein, 1744 aa, homo sapiens
MRLLWGLIWASSFFTLSLQKPRLLLFSPSVVHLGVPLSVGVQLQDVPRGQVVKGSVFLRNPSRNNVPCSPKVDFTLSSERDFALLSLQVPLKDAKSCGLHQLLRGPEVQLVAHSPWLKDSLSRTTNIQGINLLFSSRRGHLFLQTDQPIYNPGQRVRYRVFALDQKMRPSTDTITVMVENSHGLRVRKKEVYMPSSIFQDDFVIPDISEPGTWKISARFSDGLESNSSTQFEVKKYVLPNFEVKITPGKPYILTVPGHLDEMQLDIQARYIYGKPVQGVAYVRFGLLDEDGKKTFFRGLESQTKLVNGQSHISLSKAEFQDALEKLNMGITDLQGLRLYVAAAIIESPGGEMEEAELTSWYFVSSPFSLDLSKTKRHLVPGAPFLLQALVREMSGSPASGIPVKVSATVSSPGSVPEVQDIQQNTDGSGQVSIPIIIPQTISELQLSVSAGSPHPAIARLTVAAPPSGGPGFLSIERPDSRPPRVGDTLNLNLRAVGSGATFSHYYYMILSRGQIVFMNREPKRTLTSVSVFVDHHLAPSFYFVAFYYHGDHPVANSLRVDVQAGACEGKLELSVDGAKQYRNGESVKLHLETDSLALVALGALDTALYAAGSKSHKPLNMGKVFEAMNSYDLGCGPGGGDSALQVFQAAGLAFSDGDQWTLSRKRLSCPKEKTTRKKRNVNFQKAINEKLGQYASPTAKRCCQDGVTRLPMMRSCEQRAARVQQPDCREPFLSCCQFAESLRKKSRDKGQAGLQRALEILQEEDLIDEDDIPVRSFFPENWLWRVETVDRFQILTLWLPDSLTTWEIHGLSLSKTKGLCVATPVQLRVFREFHLHLRLPMSVRRFEQLELRPVLYNYLDKNLTVSVHVSPVEGLCLAGGGGLAQQVLVPAGSARPVAFSVVPTAATAVSLKVVARGSFEFPVGDAVSKVLQIEKEGAIHREELVYELNPLDHRGRTLEIPGNSDPNMIPDGDFNSYVRVTASDPLDTLGSEGALSPGGVASLLRLPRGCGEQTMIYLAPTLAASRYLDKTEQWSTLPPETKDHAVDLIQKGYMRIQQFRKADGSYAAWLSRGSSTWLTAFVLKVLSLAQEQVGGSPEKLQETSNWLLSQQQADGSFQDLSPVIHRSMQGGLVGNDETVALTAFVTIALHHGLAVFQDEGAEPLKQRVEASISKASSFLGEKASAGLLGAHAAAITAYALTLTKAPADLRGVAHNNLMAMAQETGDNLYWGSVTGSQSNAVSPTPAPRNPSDPMPQAPALWIETTAYALLHLLLHEGKAEMADQAAAWLTRQGSFQGGFRSTQDTVIALDALSAYWIASHTTEERGLNVTLSSTGRNGFKSHALQLNNRQIRGLEEELQFSLGSKINVKVGGNSKGTLKVLRTYNVLDMKNTTCQDLQIEVTVKGHVEYTMEANEDYEDYEYDELPAKDDPDAPLQPVTPLQLFEGRRNRRRREAPKVVEEQESRVHYTVCIWRNGKVGLSGMAIADVTLLSGFHALRADLEKLTSLSDRYVSHFETEGPHVLLYFDSVPTSRECVGFEAVQEVPVGLVQPASATLYDYYNPERRCSVFYGAPSKSRLLATLCSAEVCQCAEGKCPRQRRALERGLQDEDGYRMKFACYYPRVEYGFQVKVLREDSRAAFRLFETKITQVLHFTKDVKAAANQMRNFLVRASCRLRLEPGKEYLIMGLDGATYDLEGHPQYLLDSNSWIEEMPSERLCRSTRQRAACAQLNDFLQEYGTQGCQV

SEQ ID NO: 200 - protein, 1744 aa, homo sapiens
MRLLWGLIWASSFFTLSLQKPRLLLFSPSVVHLGVPLSVGVQLQDVPRGQVVKGSVFLRNPSRNNVPCSPKVDFTLSSERDFALLSLQVPLKDAKSCGLHQLLRGPEVQLVAHSPWLKDSLSRTTNIQGINLLFSSRRGHLFLQTDQPIYNPGQRVRYRVFALDQKMRPSTDTITVMVENSHGLRVRKKEVYMPSSIFQDDFVIPDISEPGTWKISARFSDGLESNSSTQFEVKKYVLPNFEVKITPGKPYILTVPGHLDEMQLDIQARYIYGKPVQGVAYVRFGLLDEDGKKTFFRGLESQTKLVNGQSHISLSKAEFQDALEKLNMGITDLQGLRLYVAAAIIEYPGGEMEEAELTSWYFVSSPFSLDLSKTKRHLVPGAPFLLQALVREMSGSPASGIPVKVSATVSSPGSVPEVQDIQQNTDGSGQVSIPIIIPQTISELQLSVSAGSPHPAIARLTVAAPPSGGPGFLSIERPDSRPPRVGDTLNLNLRAVGSGATFSHYYYMILSRGQIVFMNREPKRTLTSVSVFVDHHLAPSFYFVAFYYHGDHPVANSLRVDVQAGACEGKLELSVDGAKQYRNGESVKLHLETDSLALVALGALDTALYAAGSKSHKPLNMGKVFEAMNSYDLGCGPGGGDSALQVFQAAGLAFSDGDQWTLSRKRLSCPKEKTTRKKRNVNFQKAINEKLGQYASPTAKRCCQDGVTRLPMMRSCEQRAARVQQPDCREPFLSCCQFAESLRKKSRDKGQAGLQRALEILQEEDLIDEDDIPVRSFFPENWLWRVETVDRFQILTLWLPDSLTTWEIHGLSLSKTKGLCVATPVQLRVFREFHLHLRLPMSVRRFEQLELRPVLYNYLDKNLTVSVHVSPVEGLCLAGGGGLAQQVLVPAGSARPVAFSVVPTAAAAVSLKVVARGSFEFPVGDAVSKVLQIEKEGAIHREELVYELNPLDHRGRTLEIPGNSDPNMIPDGDFNSYVRVTASDPLDTLGSEGALSPGGVASLLRLPRGCGEQTMIYLAPTLAASRYLDKTEQWSTLPPETKDHAVDLIQKGYMRIQQFRKADGSYAAWLSRGSSTWLTAFVLKVLSLAQEQVGGSPEKLQETSNWLLSQQQADGSFQDLSPVIHRSMQGGLVGNDETVALTAFVTIALHHGLAVFQDEGAEPLKQRVEASISKASSFLGEKASAGLLGAHAAAITAYALTLTKAPADLRGVAHNNLMAMAQETGDNLYWGSVTGSQSNAVSPTPAPRNPSDPMPQAPALWIETTAYALLHLLLHEGKAEMADQAAAWLTRQGSFQGGFRSTQDTVIALDALSAYWIASHTTEERGLNVTLSSTGRNGFKSHALQLNNRQIRGLEEELQFSLGSKINVKVGGNSKGTLKVLRTYNVLDMKNTTCQDLQIEVTVKGHVEYTMEANEDYEDYEYDELPAKDDPDAPLQPVTPLQLFEGRRNRRRREAPKVVEEQESRVHYTVCIWRNGKVGLSGMAIADVTLLSGFHALRADLEKLTSLSDRYVSHFETEGPHVLLYFDSVPTSRECVGFEAVQEVPVGLVQPASATLYDYYNPERRCSVFYGAPSKSRLLATLCSAEVCQCAEGKCPRQRRALERGLQDEDGYRMKFACYYPRVEYGFQVKVLREDSRAAFRLFETKITQVLHFTKDVKAAANQMRNFLVRASCRLRLEPGKEYLIMGLDGATYDLEGHPQYLLDSNSWIEEMPSERLCRSTRQRAACAQLNDFLQEYGTQGCQV

SEQ ID NO: 201 - protein, 181 aa, homo sapiens
MCKGLAALPHSCLERAKEIKIKLGILLQKPDSVGDLVIPYNEKPEKPAKTQKTSLDEALQWRDSLDKLLQNNYGLASFKSFLKSEFSEENLEFWIACEDYKKIKSPAKMAEKAKQIYEEFIQTEAPKEVNIDHFTKDITMKNLVEPSLSSFDMAQKRIHALMEKDSLPRFVRSEFYQELIK

SEQ ID NO: 202 - protein, 411 aa, homo sapiens
MKAARFVLRSAGSLNGAGLVPREVEHFSRYSPSPLSMKQLLDFGSENACERTSFAFLRQELPVRLANILKEIDILPTQLVNTSSVQLVKSWYIQSLMDLVEFHEKSPDDQKALSDFVDTLIKVRNRHHNVVPTMAQGIIEYKDACTVDPVTNQNLQYFLDRFYMNRISTRMLMNQHILIFSDSQTGNPSHIGSIDPNCDVVAVVQDAFECSRMLCDQYYLSSPELKLTQVNGKFPDQPIHIVYVPSHLHHMLFELFKNAMRATVEHQENQPSLTPIEVIVVLGKEDLTIKISDRGGGVPLRIIDRLFSYTYSTAPTPVMDNSRNAPLAGFGYGLPISRLYAKYFQGDLNLYSLSGYGTDAIIYLKALSSESIEKLPVFNKSAFKHYQMSSEADDWCIPSREPKNLAKEVAM

SEQ ID NO: 203 - protein, 437 aa, homo sapiens
MASVAVDPQPSVVTRVVNLPLVSSTYDLMSSAYLSTKDQYPYLKSVCEMAENGVKTITSVAMTSALPIIQKLEPQIAVANTYACKGLDRIEERLPILNQPSTQIVANAKGAVTGAKDAVTTTVTGAKDSVASTITGVMDKTKGAVTGSVEKTKSVVSGSINTVLGSRMMQLVSSGVENALTKSELLVEQYLPLTEEELEKEAKKVEGFDLVQKPSYYVRLGSLSTKLHSRAYQQALSRVKEAKQKSQQTISQLHSTVHLIEFARKNVYSANQKIQDAQDKLYLSWVEWKRSIGYDDTDESHCAEHIESRTLAIARNLTQQLQTTCHTLLSNIQGVPQNIQDQAKHMGVMAGDIYSVFRNAASFKEVSDSLLTSSKGQLQKMKESLDDVMDYLVNNTPLNWLVGPFYPQLTESQNAQDQGAEMDKSSQETQRSEHKTH

SEQ ID NO: 204 - protein, 565 aa, homo sapiens
MTFSEILDRVGSMGHFQFLHVAILGLPILNMANHNLLQIFTAATPVHHCRPPHNASTGPWVLPMGPNGKPERCLRFVHPPNASLPNDTQRAMEPCLDGWVYNSTKDSIVTEWDLVCNSNKLKEMAQSIFMAGILIGGLVLGDLSDRFGRRPILTCSYLLLAASGSGAAFSPTFPIYMVFRFLCGFGISGITLSTVILNVEWVPTRMRAIMSTALGYCYTFGQFILPGLAYAIPQWRWLQLTVSIPFFVFFLSSWWTPESIRWLVWKVLEGPEDTPAGGCLQWQEEGERLSLEELKLNLQKEISLAKAKYTASDLFRIPMLRRMTFCLSLAWFATGFAYYSLAMGVEEFGVNLYILQIIFGGVDVPAKFITILSLSYLGRHTTQAAALLLAGGAILALTFVPLDLQTVRTVLAVFGKGCLSSSFSCLFLYTSELYPTVIRQTGMGVSNLWTRVGSMVSPLVKITGEVQPFIPNIIYGITALLGGSAALFLPETLNPCQRLSKTWKTGQSLPLAPSVLLPGEAGLGPGLFLSSLSLGRAKKPKQEPEVEKASQRIPLQPHGPGLGSS

SEQ ID NO: 205 - protein, 564 aa, homo sapiens
MASTSTTIRSHSSSRRGFSANSARLPGVSRSGFSSVSVSRSRGSGGLGGACGGAGFGSRSLYGLGGSKRISIGGGSCAISGGYGSRAGGSYGFGGAGSGFGFGGGAGIGFGLGGGAGLAGGFGGPGFPVCPPGGIQEVTVNQSLLTPLNLQIDPTIQRVRAEEREQIKTLNNKFASFIDKVRFLEQQNKVLETKWTLLQEQGTKTVRQNLEPLFEQYINNLRRQLDSIVGERGRLDSELRGMQDLVEDFKNKYEDEINKRTAAENEFVTLKKDVDAAYMNKVELQAKADTLTDEINFLRALYDAELSQMQTHISDTSVVLSMDNNRNLDLDSIIAEVKAQYEEIAQRSRAEAESWYQTKYEELQVTAGRHGDDLRNTKQEIAEINRMIQRLRSEIDHVKKQCANLQAAIADAEQRGEMALKDAKNKLEGLEDALQKAKQDLARLLKEYQELMNVKLALDVEIATYRKLLEGEECRLNGEGVGQVNISVVQSTVSSGYGGASGVGSGLGLGGGSSYSYGSGLGVGGGFSSSSGRAIGGGLSSVGGGSSTIKYTTTSSSSRKSYKH

SEQ ID NO: 206 - protein, 502 aa, homo sapiens
MLAAMGSLAAALWAVVHPRTLLLGTVAFLLAADFLKRRRPKNYPPGPWRLPFLGNFFLVDFEQSHLEVQLFVKKYGNLFSLELGDISAVLITGLPLIKEALIHMDQNFGNRPVTPMREHIFKKNGLIMSSGQAWKEQRRFTLTALRNFGLGKKSLEERIQEEAQHLTEAIKEENGQPFDPHFKINNAVSNIICSITFGERFEYQDSWFQQLLKLLDEVTYLEASKTCQLYNVFPWIMKFLPGPHQTLFSNWKKLKLFVSHMIDKHRKDWNPAETRDFIDAYLKEMSKHTGNPTSSFHEENLICSTLDLFFAGTETTSTTLRWALLYMALYPEIQEKVQAEIDRVIGQGQQPSTAARESMPYTNAVIHEVQRMGNIIPLNVPREVTVDTTLAGYHLPKGTMILTNLTALHRDPTEWATPDTFNPDHFLENGQFKKREAFMPFSIGKRACLGEQLARTELFIFFTSLMQKFTFRPPNNEKLSLKFRMGITISPVSHRLCAVPQV

SEQ ID NO: 207 - protein, 737 aa, homo sapiens
MGGCTVKPQLLLLALVLHPWNPCLGADSEKPSSIPTDKLLVITVATKESDGFHRFMQSAKYFNYTVKVLGQGEEWRGGDGINSIGGGQKVRLMKEVMEHYADQDDLVVMFTECFDVIFAGGPEEVLKKFQKANHKVVFAADGILWPDKRLADKYPVVHIGKRYLNSGGFIGYAPYVNRIVQQWNLQDNDDDQLFYTKVYIDPLKREAINITLDHKCKIFQTLNGAVDEVVLKFENGKARAKNTFYETLPVAINGNGPTKILLNYFGNYVPNSWTQDNGCTLCEFDTVDLSAVDVHPNVSIGVFIEQPTPFLPRFLDILLTLDYPKEALKLFIHNKEVYHEKDIKVFFDKAKHEIKTIKIVGPEENLSQAEARNMGMDFCRQDEKCDYYFSVDADVVLTNPRTLKILIEQNRKIIAPLVTRHGKLWSNFWGALSPDGYYARSEDYVDIVQGNRVGVWNVPYMANVYLIKGKTLRSEMNERNYFVRDKLDPDMALCRNAREMGVFMYISNRHEFGRLLSTANYNTSHYNNDLWQIFENPVDWKEKYINRDYSKIFTENIVEQPCPDVFWFPIFSEKACDELVEEMEHYGKWSGGKHHDSRISGGYENVPTDDIHMKQVDLENVWLHFIREFIAPVTLKVFAGYYTKGFALLNFVVKYSPERQRSLRPHHDASTFTINIALNNVGEDFQGGGCKFLRYNCSIESPRKGWSFMHPGRLTHLHEGLPVKNGTRYIAVSFIDP

SEQ ID NO: 208 - protein, 204 aa, homo sapiens
EISVSHRVVLHINELARCEGRSGFKRGQGGRREAVERARRQAQSAAHGHRQPWASTDGAAGASRAGRRAPGRESRAELGGVSGPPLRRASALPMSLLPRRAPPVSMRLLAAALLLLLLALYTARVDGSKCKCSRKGPKIRYSDVKKLEMKPKYPHCEEKMVIITTKSVSRYRGQEHCLHPKLQSTKRFIKWYNAWNEKRRVYEE

SEQ ID NO: 209 - protein, 222 aa, homo sapiens
MAGKPKLHYFNGRGRMEPIRWLLAAAGVEFEEKFIGSAEDLGKLRNDGSLMFQQVPMVEIDGMKLVQTRAILNYIASKYNLYGKDIKERALIDMYTEGMADLNEMILLLPLCRPEEKDAKIALIKEKTKSRYFPAFEKVLQSHGQDYLVGNKLSRADISLVELLYYVEELDSSLISNFPLLKALKTRISNLPTVKKFLQPGSPRKPPADAKALEEARKIFRF

SEQ ID NO: 210 - protein, 135 aa, homo sapiens
MPPNLTGYYRFVSQKNMEDYLQALNISLAVRKIALLLKPDKEIEHQGNHMTVRTLSTFRNYTVQFDVGVEFEEDLRSVDGRKCQTIVTWEEEHLVCVQKGEVPNRGWRHWLEGEMLYLELTARDAVCEQVFRKVR

SEQ ID NO: 211 - protein, 196 aa, homo sapiens
MPGMFFSANPKELKGTTHSLLDDKMQKRRPKTFGMDMKAYLRSMIPHLESGMKSSKSKDVLSAAEVMQWSQSLEKLLANQTGQNVFGSFLKSEFSEENIEFWLACEDYKKTESDLLPCKAEEIYKAFVHSDAAKQINIDFRTRESTAKKIKAPTPTCFDEAQKVIYTLMEKDSYPRFLKSDIYLNLLNDLQANSLK

SEQ ID NO: 212 - protein, 957 aa, homo sapiens
MNFAEREGSKRYCIQTKHVAILCAVVVGVGLIVGLAVGLTRSCDSSGDGGPGTAPAPSHLPSSTASPSGPPAQDQDICPASEDESGQWKNFRLPDFVNPVHYDLHVKPLLEEDTYTGTVSISINLSAPTRYLWLHLRETRITRLPELKRPSGDQVQVRRCFEYKKQEYVVVEAEEELTPSSGDGLYLLTMEFAGWLNGSLVGFYRTTYTENGQVKSIVATDHEPTDARKSFPCFDEPNKKATYTISITHPKEYGALSNMPVAKEESVDDKWTRTTFEKSVPMSTYLVCFAVHQFDSVKRISNSGKPLTIYVQPEQKHTAEYAANITKSVFDYFEEYFAMNYSLPKLDKIAIPDFGTGAMENWGLITYRETNLLYDPKESASSNQQRVATVVAHELVHQWFGNIVTMDWWEDLWLNEGFASFFEFLGVNHAETDWQMRDQMLLEDVLPVQEDDSLMSSHPIIVTVTTPDEITSVFDGISYSKGSSILRMLEDWIKPENFQKGCQMYLEKYQFKNAKTSDFWAALEEASRLPVKEVMDTWTRQMGYPVLNVNGVKNITQKRFLLDPRANPSQPPSDLGYTWNIPVKWTEDNITSSVLFNRSEKEGITLNSSNPSGNAFLKINPDHIGFYRVNYEVATWDSIATALSLNHKTFSSADRASLIDDAFALARAQLLDYKVALNLTKYLKREENFLPWQRVISAVTYIISMFEDDKELYPMIEEYFQGQVKPIADSLGWNDAGDHVTKLLRSSVLGFACKMGDREALNNASSLFEQWLNGTVSLPVNLRLLVYRYGMQNSGNEISWNYTLEQYQKTSLAQEKEKLLYGLASVKNVTLLSRYLDLLKDTNLIKTQDVFTVIRYISYNSYGKNMAWNWIQLNWDYLVNRYTLNNRNLGRIVTIAEPFNTELQLWQMESFFAKYPQAGAGEKPREQVLETVKNNIEWLKQHRNTIREWFFNLLESG

SEQ ID NO: 213 - protein, 202 aa, homo sapiens
MKVLAAGVVPLLLVLHWKHGAGSPLPITPVNATCAIRHPCHNNLMNQIRSQLAQLNGSANALFILYYTAQGEPFPNNLDKLCGPNVTDFPPFHANGTEKAKLVELYRIVVYLGTSLGNITRDQKILNPSALSLHSKLNATADILRGLLSNVLCRLCSKYHVGHVDVTYGPDTSGKDVFQKKKLGCQLLGKYKQIIAVLAQAF

SEQ ID NO: 214 - protein, 248 aa, homo sapiens
QGMERPAAREPHGPDALRRFQGLLLDRRGRLHGQVLRLREVARRLERLRRRSLVANVAGSSLSATGALAAIVGLSLSPVTLGTSLLVSAVGLGVATAGGAVTITSDLSLIFCNSRELRRVQEIAATCQDQMREILSCLEFFCRWQGCGDRQLLQCGRNASIALYNSVYFIVFFGSRGFLIPRRAEGDTKVSQAVLKAKIQKLAESLESCTGALDELSEQLESRVQLCTKSSRGHDLKISADQRAGLFF

SEQ ID NO: 215 - protein, 431 aa, homo sapiens
MTVKTEAAKGTLTYSRMRGMVAILIAFMKQRRMGLNDFIQKIANNSYACKHPEVQSILKISQPQEPELMNANPSPPPSPSQQINLGPSSNPHAKPSDFHFLKVIGKGSFGKVLLARHKAEEVFYAVKVLQKKAILKKKEEKHIMSERNVLLKNVKHPFLVGLHFSFQTADKLYFVLDYINGGELFYHLQRERCFLEPRARFYAAEIASALGYLHSLNIVYRDLKPENILLDSQGHIVLTDFGLCKENIEHNSTTSTFCGTPEYLAPEVLHKQPYDRTVDWWCLGAVLYEMLYGLPPFYSRNTAEMYDNILNKPLQLKPNITNSARHLLEGLLQKDRTKRLGAKDDFMEIKSHVFFSLINWDDLINKKITPPFNPNVSGPNDLRHFDPEFTEEPVPNSIGKSPDSVLVTASVKEAAEAFLGFSYAPPTDSFL

SEQ ID NO: 216 - protein, 227 aa, homo sapiens
MAPCHIRKYQESDRQWVVGLLSRGMAEHAPATFRQLLKLPRTLILLLGGPLALLLVSGSWLLALVFSISLFPALWFLAKKPWTEYVDMTLCTDMSDITKSYLSERGSCFWVAESEEKVVGMVGALPVDDPTLREKRLQLFHLFVDSEHRRQGIAKALVRTVLQFARDQGYSEVILDTGTIQLSAMALYQSMGFKKTGQSFFCVWARLVALHTVHFIYHLPSSKVGSL

SEQ ID NO: 217 - protein, 261 aa, homo sapiens
MAESHLQSSLITASQFFEIWLHFDADGSGYLEGKELQNLIQELQQARKKAGLELSPEMKTFVDQYGQRDDGKIGIVELAHVLPTEENFLLLFRCQQLKSCEEFMKTWRKYDTDHSGFIETEELKNFLKDLLEKANKTVDDTKLAEYTDLMLKLFDSNNDGKLELTEMARLLPVQENFLLKFQGIKMCGKEFNKAFELYDQDGNGYIDENELDALLKDLCEKNKQDLDINNITTYKKNIMALSDGGKLYRTDLALILCAGDN

SEQ ID NO: 218 - protein, 490 aa, homo sapiens
RLTLVLALATLIAAFGSSFQYGYNVAAVNSPALLMQQFYNETYYGRTGEFMEDFPLTLLWSVTVSMFPFGGFIGSLLVGPLVNKFGRKGALLFNNIFSIVPAILMGCSRVATSFELIIISRLLVGICAGVSSNVVPMYLGELAPKNLRGALGVVPQLFITVGILVAQIFGLRNLLANVDGWPILLGLTGVPAALQLLLLPFFPESPRYLLIQKKDEAAAKKALQTLRGWDSVDREVAEIRQEDEAEKAAGFISVLKLFRMRSLRWQLLSIIVLMGGQQLSGVNAIYYYADQIYLSAGVPEEHVQYVTAGTGAVNVVMTFCAVFVVELLGRRLLLLLGFSICLIACCVLTAALALQDTVSWMPYISIVCVISYVIGHALGPSPIPALLITEIFLQSSRPSAFMVGGSVHWLSNFTVGLIFPFIQEGLGPYSFIVFAVICLLTTIYIFLIVPETKAKTFIEINQIFTKMNKVSEVYPEKEELKELPPVTSEQ

SEQ ID NO: 219 - protein, 191 aa, homo sapiens
MNFLLSWVHWSLALLLYLHHAKWSQAAPMAEGGGQNHHEVVKFMDVYQRSYCHPIETLVDIFQEYPDEIEYIFKPSCVPLMRCGGCCNDEGLECVPTEESNITMQIMRIKPHQGQHIGEMSFLQHNKCECRPKKDRARQENPCGPCSERRKHLFVQDPQTCKCSCKNTDSRCKARQLELNERTCRCDKPRR

SEQ ID NO: 220 - protein, 231 aa, homo sapiens
MNFLLSWVHWSLALLLYLHHAKWSQAAPMAEGGGQNHHEVVKFMDVYQRSYCHPIETLVDIFQEYPDEIEYIFKPSCVPLMRCGGCCNDEGLECVPTEESNITMQIMRIKPHQGQHIGEMSFLQHNKCECRPKKDRARQEKKSVRGKGKGQKRKRKKSRKSWSVYVGARCCLMPWSLPGPHPCGPCSERRKHLFVQDPQTCKCSCKNTDSRCKARQLELNERTCRCDKPRR

SEQ ID NO: 221 - protein, 307 aa, homo sapiens
MAALLLGAVLLVAQPQLVPSRPAELGQQELLRKAGTLQDDVRDGVAPNGSAQQLPQTIIIGVRKGGTRALLEMLSLHPDVAAAENEVHFFDWEEHYSHGLGWYLSQMPFSWPHQLTVEKTPAYFTSPKVPERVYSMNPSIRLLLILRDPSERVLSDYTQVFYNHMQKHKPYPSIEEFLVRDGRLNVDYKALNRSLYHVHMQNWLRFFPLRHIHIVDGDRLIRDPFPEIQKVERFLKLSPQINASNFYFNKTKGFYCLRDSGRDRCLHESKGRAHPQVDPKLLNKLHEYFHEPNKKFFELVGRTFDWH

SEQ ID NO: 222 - protein, 163 aa, homo sapiens
MMLPLQGAQMLQMLEKSLRKSLPASLKVYGTVFHINHGNPFNLKAVVDKWPDFNTVVVCPQEQDMTDDLDHYTNTYQIYSKDPQNCQEFLGSPELINWKQHLQIQSSQPSLNEAIQNLAAIKSFKVKQTQRILYMAAETAKELTPFLLKSKILSPNGGKPKAM

SEQ ID NO: 223 - protein, 873 aa, homo sapiens
MGNRGMEDLIPLVNRLQDAFSAIGQNADLDLPQIAVVGGQSAGKSSVLENFVGRDFLPRGSGIVTRRPLVLQLVNATTEYAEFLHCKGKKFTDFEEVRLEIEAETDRVTGTNKGISPVPINLRVYSPHVLNLTLVDLPGMTKVPVGDQPPDIEFQIRDMLMQFVTKENCLILAVSPANSDLANSDALKVAKEVDPQGQRTIGVITKLDLMDEGTDARDVLENKLLPLRRGYIGVVNRSQKDIDGKKDITAALAAERKFFLSHPSYRHLADRMGTPYLQKVLNQQLTNHIRDTLPGLRNKLQSQLLSIEKEVEEYKNFRPDDPARKTKALLQMVQQFAVDFEKRIEGSGDQIDTYELSGGARINRIFHERFPFELVKMEFDEKELRREISYAIKNIHGIRHVLGPGRVAEPQKTGLFTPDMAFETIVKKQVKKIREPCLKCVDMVISELISTVRQCTKKLQQYPRLREEMERIVTTHIREREGRTKEQVMLLIDIELAYMNTNHEDFIGFANAQQRSNQMNKKKTSGNQVIRKGWLTINNIGIMKGGSKEYWFVLTAENLSWYKDDEEKEKKYMLSVDNLKLRDVEKGFMSSKHIFALFNTEQRNVYKDYRQLELACETQEEVDSWKASFLRAGVYPERVGDKEKASETEENGSDSFMHSMDPQLERQVETIRNLVDSYMAIVNKTVRDLMPKTIMHLMINNTKEFIFSELLANLYSCGDQNTLMEESAEQAQRRDEMLRMYHALKEALSIIGDINTTTVSTPMPPPVDDSWLQVQSVPAGRRSPTSSPTPQRRAPAVPPARPGSRGPAPGPPPAGSALGGAPPVPSRPGASPDPFGPPPQVPSRPNRAPPGVPSRSGQASPSRPESPRPPFDL

SEQ ID NO: 224 - protein, 83 aa, homo sapiens
MRLFLSLPVLVVVLSIVLEGPAPAQGTPDVSSALDKLKEFGNTLEDKARELISRIKQSELSAKMREWFSETFQKVKEKLKIDS

SEQ ID NO: 225 - protein, 382 aa, homo sapiens
MALQGISVVELSGLAPGPFCAMVLADFGARVVRVDRPGSRYDVSRLGRGKRSLVLDLKQPRGAAVLRRLCKRSDVLLEPFRRGVMEKLQLGPEILQRENPRLIYARLSGFGQSGSFCRLAGHDINYLALSGVLSKIGRSGENPYAPLNLLADFAGGGLMCALGIIMALFDRTRTGKGQVIDANMVEGTAYLSSFLWKTQKLSLWEAPRGQNMLDGGAPFYTTYRTADGEFMAVGAIEPQFYELLIKGLGLKSDELPNQMSMDDWPEMKKKFADVFAEKTKAEWCQIFDGTDACVTPVLTFEEVVHHDHNKERGSFITSEEQDVSPRPAPLLLNTPAIPSFKRDPFIGEHTEEILEEFGFSREEIYQLNSDKIIESNKVKASL

SEQ ID NO: 226 - protein, 690 aa, homo sapiens
MAPWPELGDAQPNPDKYLEGAAGQQPTAPDKSKETNKTDNTEAPVTKIELLPSYSTATLIDEPTEVDDPWNLPTLQDSGIKWSERDTKGKILCFFQGIGRLILLLGFLYFFVCSLDILSSAFQLVGGKMAGQFFSNSSIMSNPLLGLVIGVLVTVLVQSSSTSTSIVVSMVSSSLLTVRAAIPIIMGANIGTSITNTIVALMQVGDRSEFRRAFAGATVHDFFNWLSVLVLLPVEVATHYLEIITQLIVESFHFKNGEDAPDLLKVITKPFTKLIVQLDKKVISQIAMNDEKAKNKSLVKIWCKTFTNKTQINVTVPSTANCTSPSLCWTDGIQNWTMKNVTYKENIAKCQHIFVNFHLPDLAVGTILLILSLLVLCGCLIMIVKILGSVLKGQVATVIKKTINTDFPFPFAWLTGYLAILVGAGMTFIVQSSSVFTSALTPLIGIGVITIERAYPLTLGSNIGTTTTAILAALASPGNALRSSLQIALCHFFFNISGILLWYPIPFTRLPIRMAKGLGNISAKYRWFAVFYLIIFFFLIPLTVFGLSLAGWRVLVGVGVPVVFIIILVLCLRLLQSRCPRVLPKKLQNWNFLPLWMRSLKPWDAVVSKFTGCFQMRCCCCCRVCCRACCLLCDCPKCCRCSKCCEDLEEAQEGQDVPVKAPETFDNITISREAQGEVPASDSKTECTAL

SEQ ID NO: 227 - protein, 323 aa, homo sapiens
MDSKHQCVKLNDGHFMPVLGFGTYAPPEVPRSKALEVTKLAIEAGFRHIDSAHLYNNEEQVGLAIRSKIADGSVKREDIFYTSKLWSTFHRPELVRPALENSLKKAQLDYVDLYLIHSPMSLKPGEELSPTDENGKVIFDIVDLCTTWEAMEKCKDAGLAKSIGVSNFNRRQLEMILNKPGLKYKPVCNQVECHPYFNRSKLLDFCKSKDIVLVAYSALGSQRDKRWVDPNSPVLLEDPVLCALAKKHKRTPALIALRYQLQRGVVVLAKSYNEQRIRQNVQVFEFQLTAEDMKAIDGLDRNLHYFNSDSFASHPNYPYSDEY

SEQ ID NO: 228 - protein, 164 aa, homo sapiens
MLGPQVWSSVRQGLSRSLSRNVGVWASGEGKKVDIAGIYPPVTTPFTATAEVDYGKLEENLHKLGTFPFRGAVGGVCALANVLGAQVCQLERLCCTGQWEDAQKLQHRLIEPNAAVTRRFGIPGLKKIMDWFGYYGGPCRAPLQELSPAEEEALRMDFTSNGWL

SEQ ID NO: 229 - protein, 649 aa, homo sapiens
MISAAWSIFLIGTKIGLFLQVAPLSVMAKSCPSVCRCDAGFIYCNDRFLTSIPTGIPEDATTLYLQNNQINNAGIPSDLKNLLKVERIYLYHNSLDEFPTNLPKYVKELHLQENNIRTITYDSLSKIPYLEELHLDDNSVSAVSIEEGAFRDSNYLRLLFLSRNHLSTIPWGLPRTIEELRLDDNRISTISSPSLQGLTSLKRLVLDGNLLNNHGLGDKVFFNLVNLTELSLVRNSLTAAPVNLPGTNLRKLYLQDNHINRVPPNAFSYLRQLYRLDMSNNNLSNLPQGIFDDLDNITQLILRNNPWYCGCKMKWVRDWLQSLPVKVNVRGLMCQAPEKVRGMAIKDLNAELFDCKDSGIVSTIQITTAIPNTVYPAQGQWPAPVTKQPDIKNPKLTKDHQTTGSPSRKTITITVKSVTSDTIHISWKLALPMTALRLSWLKLGHSPAFGSITETIVTGERSEYLVTALEPDSPYKVCMVPMETSNLYLFDETPVCIETETAPLRMYNPTTTLNREQEKEPYKNPNLPLAAIIGGAVALVTIALLALVCWYVHRNGSLFSRNCAYSKGRRRKDDYAEAGTKKDNSILEIRETSFQMLPISNEPISKEEFVIHTIFPPNGMNLYKNNHSESSSNRSYRDSGIPDSDHSHS

SEQ ID NO: 230 - protein, 454 aa, homo sapiens
MCAAQMPPLAHIFRGTFVHSTWTCPMEVLRDHLLGVSDSGKIVFLEEASQQEKLAKEWCFKPCEIRELSHHEFFMPGLVDTHIHASQYSFAGSSIDLPLLEWLTKYTFPAEHRFQNIDFAEEVYTRVVRRTLKNGTTTACYFATIHTDSSLLLADITDKFGQRAFVGKVCMDLNDTFPEYKETTEESIKETERFVSEMLQKNYSRVKPIVTPRFSLSCSETLMGELGNIAKTRDLHIQSHISENRDEVEAVKNLYPSYKNYTSVYDKNNLLTNKTVMAHGCYLSAEELNVFHERGASIAHCPNSNLSLSSGFLNVLEVLKHEVKIGLGTDVAGGYSYSMLDAIRRAVMVSNILLINKVNEKSLTLKEVFRLATLGGSQALGLDGEIGNFEVGKEFDAILINPKASDSPIDLFYGDFFGDISEAVIQKFLYLGDDRNIEEVYVGGKQVVPFSSSV

SEQ ID NO: 231 - protein, 240 aa, homo sapiens
MTPHRLLPPLLLLLALLLAASPGGALARCPGCGQGVQAGCPGGCVEEEDGGSPAEGCAEAEGCLRREGQECGVYTPNCAPGLQCHPPKDDEAPLRALLLGRGRCLPARAPAVAEENPKESKPQAGTARPQDVNRRDQQRNPGTSTTPSQPNSAGVQDTEMGPCRRHLDSVLQQLQTEVYRGAQTLYVPNCDHRGFYRKRQCRSSQGQRRGPCWCVDRMGKSLPGSPDGNGSSSCPTGSSG

SEQ ID NO: 232 - protein, 718 aa, homo sapiens
MIVDKLLDDSRGGEGLRDAAGGCGLMTSPLNLSYFYGASPPAAAPGACDASCSVLGPSAPGSPGSDSSDFSSASSVSSCGAVESRSRGGARAERQPVEPHMGVGRQQRGPFQGVRVKNSVKELLLHIRSHKQKASGQAVDDFKTQGVNIEQFRELKNTVSYSGKRKGPDSLSDGPACKRPALLHSQFLTPPQTPTPGESMEDVHLNEPKQESSADLLQNIINIKNECSPVSLNTVQVSWLNPVVVPQSSPAEQCQDFHGGQVFSPPQKCQPFQVRGSQQMIDQASLYQYSPQNQHVEQQPHYTHKPTLEYSPFPIPPQSPAYEPNLFDGPESQFCPNQSLVSLLGDQRESENIANPMQTSSSVQQQNDAHLHSFSMMPSSACEAMVGHEMASDSSNTSLPFSNMGNPMNTTQLGKSLFQWQVEQEESKLANISQDQFLSKDADGDTFLHIAVAQGRRALSYVLARKMNALHMLDIKEHNGQSAFQVAVAANQHLIVQDLVNIGAQVNTTDCWGRTPLHVCAEKGHSQVLQAIQKGAVGSNQFVDLEATNYDGLTPLHCAVIAHNAVVHELQRNQQPHSPEVQELLLKNKSLVDTIKCLIQMGAAVEAKDRKSGRTALHLAAEEANLELIRLFLELPSCLSFVNAKAYNGNTALHVAASLQYRLTQLDAVRLLMRKGADPSTRNLENEQPVHLVPDGPVGEQIRRILKGKSIQQRAPPY

SEQ ID NO: 233 - protein, 220 aa, homo sapiens
MASAGMQILGVVLTLLGWVNGLVSCALPMWKVTAFIGNSIVVAQVVWEGLWMSCVVQSTGQMQCKVYDSLLALPQDLQAARALCVIALLVALFGLLVYLAGAKCTTCVEEKDSKARLVLTSGIVFVISGVLTLIPVCWTAHAIIRDFYNPLVAEAQKRELGASLYLGWAASGLLLLGGGLLCCTCPSGGSQGPSHYMARYSTSAPAISRGPSEYPTKNYV

SEQ ID NO: 234 - protein, 736 aa, homo sapiens
LEDRLFHQFKRFGEISLRLSHTPELGRVAYVNFRHPQDAREARQHALARQLLLYDRPLKVEPVYLRGGGGSSRRSSSSSAAASTPPPGPPAPADPLGYLPLHGGYQYKQRSLSPVAAPPLREPRARHAAAAFALDAAAAAAVGLSRERALDYYGLYDDRGRPYGYPAVCEEDLMPEDDQRATRNLFIGNLDHSVSEVELRRAFEKYGIIEEVVIKRPARGQGGAYAFLKFQNLDMAHRAKVAMSGRVIGRNPIKIGYGKANPTTRLWVGGLGPNTSLAALAREFDRFGSIRTIDHVKGDSFAYIQYESLDAAQAACAKMRGFPLGGPDRRLRVDFAKAEETRYPQQYQPSPLPVHYELLTDGYTRHRNLDADLVRDRTPPHLLYSDRDRTFLEGDWTSPSKSSDRRNSLEGYSRSVRSRSGERWGADGDRGLPKPWEERRKRRSLSSDRGRTTHSPYEERSRTKGSGQQSERGSDRTPERSRKENHSSEGTKESSSNSLSNSRHGAEERGHHHHHHEAADSSHGKKARDSERNHRTTEAEPKPLEEPKHETKKLKNLSEYAQTLQLGWNGLLVLKNSCFPTSMHILEGDQGVISSLLKDHTSGSKLTQLKIAQRLRLDQPKLDEVTRRIKQGSPNGYAVLLATQATPSGLGTEGMPTVEPGLQRRLLRNLVSYLKQKQAAGVISLPVGGSKGRDGTGMLYAFPPCDFSQQYLQSALRTLGKLEEEHMVIVIVRDTA

SEQ ID NO: 235 - protein, 501 aa, homo sapiens
MSSSGTPDLPVLLTDLKIQYTKIFINNEWHDSVSGKKFPVFNPATEEELCQVEEGDKEDVDKAVKAARQAFQIGSPWRTMDASERGRLLYKLADLIERDRLLLATMESMNGGKLYSNAYLNDLAGCIKTLRYCAGWADKIQGRTIPIDGNFFTYTRHEPIGVCGQIIPWNFPLVMLIWKIGPALSCGNTVVVKPAEQTPLTALHVASLIKEAGFPPGVVNIVPGYGPTAGAAISSHMDIDKVAFTGSTEVGKLIKEAAGKSNLKRVTLELGGKSPCIVLADADLDNAVEFAHHGVFYHQGQCCIAASRIFVEESIYDEFVRRSVERAKKYILGNPLTPGVTQGPQIDKEQYDKILDLIESGKKEGAKLECGGGPWGNKGYFVQPTVFSNVTDEMRIAKEEIFGPVQQIMKFKSLDDVIKRANNTFYGLSAGVFTKDIDKAITISSALQAGTVWVNCYGVVSAQCPFGGFKMSGNGRELGEYGFHEYTEVKTVTVKISQKNS

SEQ ID NO: 236 - protein, 124 aa, homo sapiens
MPACRLGPLAAALLLSLLLFGFTLVSGTGAEKTGVCPELQADQNCTQECVSDSECADNLKCCSAGCATFCSLPNDKEGSCPQVNINFPQLGLCRDQCQVDSQCPGQMKCCRNGCGKVSCVTPNF

SEQ ID NO: 237 - protein, 102 aa, homo sapiens
MPACRLGPLAAALLLSLLLFGFTLVSGTGAEKTGVCPELQADQNCTQECVSDSECADNLKCCSAGCATFCSLPNALFHWHLKTRRLWEISGPRPRRPTWDSS

SEQ ID NO: 238 - protein, 76 aa, homo sapiens
MPACRLGPLAAALLLSLLLFGFTLVSDKEGSCPQVNINFPQLGLCRDQCQVDSQCPGQMKCCRNGCGKVSCVTPNF

SEQ ID NO: 239 - protein, 165 aa, homo sapiens
GPEGSRGDRWGTREAGAGRRCSHGGARPAGLGNEGLGLGGDPDHTDTGSRSKQRINNWKESKHKVIMASASARGNQDKDAHFPPPSKQSLLFCPKSKLHIHRAEISKIMRECQEESFWKRALPFSLVSMLVTQGLVYQGYLAANSRFGSLPKVARTASLPVRNAK

SEQ ID NO: 240 - protein, 635 aa, homo sapiens
MAKKSAENGIYSVSGDEKKGPLIAPGPDGAPAKGDGPVGLGTPGGRLAVPPRETWTRQMDFIMSCVGFAVGLGNVWRFPYLCYKNGGGVFLIPYVLIALVGGIPIFFLEISLGQFMKAGSINVWNICPLFKGLGYASMVIVFYCNTYYIMVLAWGFYYLVKSFTTTLPWATCGHTWNTPDCVEIFRHEDCANASLANLTCDQLADRRSPVIEFWENKVLRLSGGLEVPGALNWEVTLCLLACWVLVYFCVWKGVKSTGKIVYFTATFPYVVLVVLLVRGVLLPGALDGIIYYLKPDWSKLGSPQVWIDAGTQIFFSYAIGLGALTALGSYNRFNNNCYKDAIILALINSGTSFFAGFVVFSILGFMAAEQGVHISKVAESGPGLAFIAYPRAVTLMPVAPLWAALFFFMLLLLGLDSQFVGVEGFITGLLDLLPASYYFRFQREISVALCCALCFVIDLSMVTDGGMYVFQLFDYYSASGTTLLWQAFWECVVVAWVYGADRFMDDIACMIGYRPCPWMKWCWSFFTPLVCMGIFIFNVVYYEPLVYNNTYVYPWWGEAMGWAFALSSMLCVPLHLLGCLLRAKGTMAERWQHLTQPIWGLHHLEYRAQDADVRGLTTLTPVSESSKVVVVESVM

SEQ ID NO: 241 - protein, 805 aa, homo sapiens [sequence omitted]

SEQ ID NO: 242 - protein, 853 aa, homo sapiens
MGSDRARKGGGGPKDFGAGLKYNSRHEKVNGLEEGVEFLPVNNVKKVEKHGPGRWVVLAAVLIGLLLVLLGIGFLVWHLQYRDVRVQKVFNGYMRITNENFVDAYENSNSTEFVSLASKVKDALKLLYSGVPFLGPYHKESAVTAFSEGSVIAYYWSEFSIPQHLVEEAERVMAEERVVMLPPRARSLKSFVVTSVVAFPTDSKTVQRTQDNSCSFGLARGVELMRFTTPGFPDSPYPAHACQWALRGDADSVLSLTFRSFDLASCDERGSDLVTVYNTLSPMEPHALVQLCGTYPPSYNLTFHSSQNVLLITLITNTERRHPGFEATFFQLPRMSSCGGRLRKAQGTFNSPYYPGHYPPNIDCTWNIEVPNNQHVKVRFKFFYLLEPGVPAGTCPKDYVEINGEKYCGERSQFVVTSNSNKITVRFHSDQSYTDTGFLAEYLSYDSSDPCPGQFTCRTGRCIRKELRCDGWADCTDHSDELNCSCDAGHQFTCKNKFCKPLFWVCDSVNDCGDNSDEQGCSCPAQTFRCSNGKCLSKSQQCNGKDDCGDGSDEASCPKVNVVTCTKHTYRCLNGLCLSKGNPECDGKEDCSDGSDEKDCDCGLRSFTRQARVVGGTDADEGEWPWQVSLHALGQGHICGASLISPNWLVSAAHCYIDDRGFRYSDPTQWTAFLGLHDQSQRSAPGVQERRLKRIISHPFFNDFTFDYDIALLELEKPAEYSSMVRPICLPDASHVFPAGKAIWVTGWGHTQYGGTGALILQKGEIRVINQTTCENLLPQQITPRMMCVGFLSGGVDSCQGDSGGPLSSVEADGRIFQAGVVSWGDGCAQRNKPGVYTRLPLFRDWIKENTGV

SEQ ID NO: 243 - protein, 1235 aa, homo sapiens [sequence omitted]

SEQ ID NO: 244 - protein, 375 aa, homo sapiens
MDAIHIGMSSTPLVKHTAGAGLKANRPRVMSKSGHSNVRIDKVDGIYLLYLQDLWTTVIDMKWRYKLTLFAATFVMTWFLFGVIYYAIAFIHGDLEPGEPISNHTPCIMKVDSLTGAFLFSLESQTTIGYGVRSITEECPHAIFLLVAQLVITTLIEIFITGTFLAKIARPKKRAETIKFSHCAVITKQNGKLCLVIQVANMRKSLLIQCQLSGKLLQTHVTKEGERILLNQATVKFHVDSSSESPFLILPMTFYHVLDETSPLRDLTPQNLKEKEFELVVLLNATVESTSAVCQSRTSYIPEEIYWGFEFVPVVSLSKNGKYVADFSQFEQIRKSPDCTFYCADSEKQQLEEKYRQEDQRERELRTLLLQQSNV

SEQ ID NO: 245 - protein, 300 aa, homo sapiens
RSDAAVRRISSAQSAPQVVLVCRVMTSFRLALIQLQISSIKSDNVTRACSFIREAATQGAKIVSLPECFNSPYGAKYFPEYAEKIPGESTQKLSEVAKECSIYLIGGSIPEEDAGKLYNTCAVFGPDGTLLAKYRKIHLFDIDVPGKITFQESKTLSPGDSFSTFDTPYCRVGLGICYDMRFAELAQIYAQRGCQLLVYPGAFNLTTGPAHWELLQRSRAVDNQVYVATASPARDDKASYVAWGHSTVVNPWGEVLAKAGTEEAIVYSDIDLKKLAEIRQQIPVFRQKRSDLYAVEMKKP

SEQ ID NO: 246 - protein, 463 aa, homo sapiens
MGAGPSLLLAALLLLLSGDGAVRCDTPANCTYLDLLGTWVFQVGSSGSQRDVNCSVMGPQEKKVVVYLQKLDTAYDDLGNSGHFTIIYNQGFEIVLNDYKWFAFFKYKEEGSKVTTYCNETMTGWVHDVLGRNWACFTGKKVGTASENVYVNIAHLKNSQEKYSNRLYKYDHNFVKAINAIQKSWTATTYMEYETLTLGDMIRRSGGHSRKIPRPKPAPLTAEIQQKILHLPTSWDWRNVHGINFVSPVRNQASCGSCYSFASMGMLEARIRILTNNSQTPILSPQEVVSCSQYAQGCEGGFPYLIAGKYAQDFGLVEEACFPYTGTDSPCKMKEDCFRYYSSEYHYVGGFYGGCNEALMKLELVHHGPMAVAFEVYDDFLHYKKGIYHHTGLRDPFNPFELTNHAVLLVGYGTDSASGMDYWIVKNSWGTGWGENGYFRIRRGTDECAIESIAVAATPIPKL

SEQ ID NO: 247 - protein, 134 aa, homo sapiens
MGAGPSLLLAALLLLLSGDGAVRCDTPANCTYLDLLGTWVFQVGSSGSQRDVNCSVMGPQEKKVVVYLQKLDTAYDDLGNSGHFTIIYNQGFEIVLNDYKWFAFFKDVTDFISHLFMQLGTVGIYDLPHLRNKL

SEQ ID NO: 248 - protein, 1265 aa, homo sapiens
MSTTVNVDSLAEYEKSQIKRALELGTVMTVFSFRKSTPERRTVQVIMETRQVAWSKTADKIEGFLDIMEIKEIRPGKNSKDFERAKAVRQKEDCCFTILYGTQFVLSTLSLAADSKEDAVNWLSGLKILHQEAMNASTPTIIESWLRKQIYSVDQTRRNSISLRELKTILPLINFKVSSAKFLKDKFVEIGAHKDELSFEQFHLFYKKLMFEQQKSILDEFKKDSSVFILGNTDRPDASAVYLHDFQRFLIHEQQEHWAQDLNKVRERMTKFIDDTMRETAEPFLFVDEFLTYLFSRENSIWDEKYDAVDMQDMNNPLSHYWISSSHNTYLTGDQLRSESSPEAYIRCLRMGCRCIELDCWDGPDGKPVIYHGWTRTTKIKFDDVVQAIKDHAFVTSSFPVILSIEEHCSVEQQRHMAKAFKEVFGDLLLTKPTEASADQLPSPSQLREKIIIKHKKLGPRGDVDVNMEDKKDEHKQQGELYMWDSIDQKWTRHYCAIADAKLSFSDDIEQTMEEEVPQDIPPTELHFGEKWFHKKVEKRTSAEKLLQEYCMETGGKDGTFLVRESETFPNDYTLSFWRSGRVQHCRIRSTMEGGTLKYYLTDNLTFSSIYALIQHYRETHLRCAEFELRLTDPVPNPNPHESKPWYYDSLSRGEAEDMLMRIPRDGAFLIRKREGSDSYAITFRARGKVKHCRINRDGRHFVLGTSAYFESLVELVSYYEKHSLYRKMRLRYPVTPELLERYNMERDINSLYDVSRMYVDPSEINPSMPQRTVKALYDYKAKRSDELSFCRGALIHNVSKEPGGWWKGDYGTRIQQYFPSNYVEDISTADFEELEKQIIEDNPLGSLCRGILDLNTYNVVKAPQGKNQKSFVFILEPKQQGDPPVEFATDRVEELFEWFQSIREITWKIDTKENNMKYWEKNQSIAIELSDLVVYCKPTSKTKDNLENPDFREIRSFVETKADSIIRQKPVDLLKYNQKGLTRVYPKGQRVDSSNYDPFRLWLCGSQMVALNFQTADKYMQMNHALFSLNGRTGYVLQPESMRTEKYDPMPPESQRKILMTLTVKVLGARHLPKLGRSIACPFVEVEICGAEYDNNKFKTTVVNDNGLSPIWAPTQEKVTFEIYDPNLAFLRFVVYEEDMFSDPNFLAHATYPIKAVKSGFRSVPLKNGYSEDIELASLLVFCEMRPVLESEEELYSSCRQLRRRQEELNNQLFLYDTHQNLRNANRDALVKEFSVNENQLQLYQEKCNKRLREKRVSNSKFYS

SEQ ID NO: 249 - protein, 260 aa, homo sapiens
MSHHWGYGKHNGPEHWHKDFPIAKGERQSPVDIDTHTAKYDPSLKPLSVSYDQATSLRILNNGHAFNVEFDDSQDKAVLKGGPLDGTYRLIQFHFHWGSLDGQGSEHTVDKKKYAAELHLVHWNTKYGDFGKAVQQPDGLAVLGIFLKVGSAKPGLQKVVDVLDSIKTKGKSADFTNFDPRGLLPESLDYWTYPGSLTTPPLLECVTWIVLKEPISVSSEQVLKFRKLNFNGEGEPEELMVDNWRPAQPLKNRQIKASFK

SEQ ID NO: 250 - protein, 991 aa, homo sapiens
MSSHHTTFPFDPERRVRSTLKKVFGFDSFKTPLQESATMAVVKGNKDVFVCMPTGAGKSLCYQLPALLAKGITIVVSPLIALIQDQVDHLLTLKVRVSSLNSKLSAQERKELLADLEREKPQTKILYITPEMAASSSFQPTLNSLVSRHLLSYLVVDEAHCVSQWGHDFRPDYLRLGALRSRLGHAPCVALTATATPQVQEDVFAALHLKKPVAIFKTPCFRANLFYDVQFKELISDPYGNLKDFCLKALGQEADKGLSGCGIVYCRTREACEQLAIELSCRGVNAKAYHAGLKASERTLVQNDWMEEKVPVIVATISFGMGVDKANVRFVAHWNIAKSMAGYYQESGRAGRDGKPSWCRLYYSRNDRDQVSFLIRKEVAKLQEKRGNKASDKATIMAFDALVTFCEELGCRHAAIAKYFGDALPACAKGCDHCQNPTAVRRRLEALERSSSWSKTCIGPSQGNGFDPELYEGGRKGYGDFSRYDEGSGGSGDEGRDEAHKREWNLFYQKQMQLRKGKDPKIEEFVPPDENCPLKEASSRRIPRLTVKAREHCLRLLEEALSSNRQSTRTADEADLRAKAVELEHETFRNAKVANLYKASVLKKVADIHRASKDGQPYDMGGSAKSCSAQAEPPEPNEYDIPPASHVYSLKPKRVGAGFPKGSCPFQTATELMETTRIREQAPQPERGGEHEPPSRPCGLLDEDGSEPLPGPRGEVPGGSAHYGGPSPEKKAKSSSGGSSLAKGRASKKQQLLATAAHKDSQSIARFFCRRVESPALLASAPEAEGACPSCEGVQGPPMAPEKYTGEEDGAGGHSPAPPQTEECLRERPSTCPPRDQGTPEVQPTPAKDTWKGKRPRSQQENPESQPQKRPRPSAKPSVVAEVKGSVSASEQGTLNPTAQDPFQLSAPGVSLKEAANVVVKCLTPFYKEGKFASKELFKGFARHLSHLLTQKTSPGRSVKEEAQNLIRHFFHGRARCESEADWHGLCGPQR

SEQ ID NO: 251 - protein, 405 aa, homo sapiens
MERWPWPSGGAWLLVAARALLQLLRSDLRLGRPLLAALALLAALDWLCQRLLPPPAALAVLAAAGWIALSRLARPQRLPVATRAVLITGCDSGFGKETAKKLDSMGFTVLATVLELNSPGAIELRTCCSPRLRLLQMDLTKPGDISRVLEFTKAHTTSTGLWGLVNNAGHNEVVADAELSPVATFRSCMEVNFFGALELTKGLLPLLRSSRGRIVTVGSPAGDMPYPCLGAYGTSKAAVALLMDTFSCELLPWGVKVSIIQPGCFKTESVRNVGQWEKRKQLLLANLPQELLQAYGKDYIEHLHGQFLHSLRLAMSDLTPVVDAITDALLAARPRRRYYPGQGLGLMYFIHYYLPEGLRRRFLQAFFISHCLPRALQPGQPGTTPPQDAAQDPNLSPGPSPAVAR

SEQ ID NO: 252 - protein, 305 aa, homo sapiens
MASRKENAKSANRVLRISQLDALELNKALEQLVWSQFTQCFHGFKPGLLARFEPEVKACLWVFLWRFTIYSKNATVGQSVLNIKYKNDFSPNLRYQPPSKNQKIWYAVCTIGGRWLEERCYDLFRNHHLASFGKVKQCVNFVIGLLKLGGLINFLIFLQRGKFATLTERLLGIHSVFCKPQNICEVGFEYMNRELLWHGFAEFLIFLLPLINVQKLKAKLSSWCIPLTGAPNSDNTLATSGKECALCGEWPTMPHTIGCEHIFCYFCAKSSFLFDVYFTCPKCGTEVHSLQPLKSGIEMSEVNAL

SEQ ID NO: 253 - protein, 1086 aa, homo sapiens
MANLLKTVVTGCSCPLLSNLGSCKGLRVKKDFLRTFYTHQELWCKAPVKPGIPYKQLTVGVPKEIFQNEKRVALSPAGVQNLVKQGFNVVVESGAGEASKFSDDHYRVAGAQIQGAKEVLASDLVVKVRAPMVNPTLGVHEADLLKTSGTLISFIYPAQNPELLNKLSQRKTTVLAMDQVPRVTIAQGYDALSSMANIAGYKAVVLAANHFGRFFTGQITAAGKVPPAKILIVGGGVAGLASAGAAKSMGAIVRGFDTRAAALEQFKSLGAEPLEVDLKESGEGQGGYAKEMSKEFIEAEMKLFAQQCKEVDILISTALIPGKKAPVLFNKEMIESMKEGSVVVDLAAEAGGNFETTKPGELYIHKGITHIGYTDLPSRMATQASTLYSNNITKLLKAISPDKDNFYFDVKDDFDFGTMGHVIRGTVVMKDGKVIFPAPTPKNIPQGAPVKQKTVAELEAEKAATITPFRKTMSTASAYTAGLTGILGLGIAAPNLAFSQMVTTFGLAGIVGYHTVWGVTPALHSPLMSVTNAISGLTAVGGLALMGGHLYPSTTSQGLAALAAFISSVNIAGGFLVTQRMLDMFKRPTDPPEYNYLYLLPAGTFVGGYLAALYSGYNIEQIMYLGSGLCCVGALAGLSTQGTARLGNALGMIGVAGGLAATLGVLKPGPELLAQMSGAMALGGTIGLTIAKRIQISDLPQLVAAFHSLVGLAAVLTCIAEYIIEYPHFATDAAANLTKIVAYLGTYIGGVTFSGSLIAYGKLQGLLKSAPLLLPGRHLLNAGLLAASVGGIIPFMVDPSFTTGITCLGSVSALSAVMGVTLTAAIGGADMPVVITVLNSYSGWALCAEGFLLNNNLLTIVGALIGSSGAILSYIMCVAMNRSLANVILGGYGTTSTAGGKPMEISGTHTEINLDNAIDMIREANSIIITPGYGLCAAKAQYPIADLVKMLTEQGKKVRFGIHPVAGRMPGQLNVLLAEAGVPYDIVLEMDEINHDFPDTDLVLVIGANDTVNSAAQEDPNSIIAGMPVLEVWKSKQVIVMKRSLGVGYAAVDNPIFYKPNTAMLLGDAKKTCDALQAKVRESYQK

SEQ ID NO: 254 - protein, 182 aa, homo sapiens
MAEFPSKVSTRTSSPAQGAEASVSALRPDLGFVRSRLGALMLLQLVLGLLVWALIADTPYHLYPAYGWVMFVAVFLWLVTIVLFNLYLFQLHMKLYMVPWPLVLMIFNISATVLYITAFIACSAAVDLTSLRGTRPYNQRAAASFFACLVMIAYGVSAFFSYQAWRGVGSNAATSQMAGGYA

SEQ ID NO: 255 - protein, 117 aa, homo sapiens
MKFQYKEDHPFEYRKKEGEKIRKKYPDRVPVIVEKAPKARVPDLDKRKYLVPSDLTVGQFYFLIRKRIHLRPEDALFFFVNNTIPPTSATMGQLYEDNHEEDYFLYVAYSDESVYGK

SEQ ID NO: 256 - protein, 257 aa, homo sapiens
MASKIGSRRWMLQLIMQLGSVLLTRCPFWGCFSQLMLYAERAEARRKPDIPVPYLYFDMGAAVLCASFMSFGVKRRWFALGAALQLAISTYAAYIGGYVHYGDWLKVRMYSRTVAIIGGFLVLASGAGELYRRKPRSRSLQSTGQVFLGIYLICVAYSLQHSKEDRLAYLNHLPGGELMIQLFFVLYGILALAFLSGYYVTLAAQILAVLLPPVMLLIDGNVAYWHNTRRVEFWNQMKLLGESVGIFGTAVILATDG

SEQ ID NO: 257 - protein, 249 aa, homo sapiens
MASRRMETKPVITCLKTLLIIYSFVFWITGVILLAVGVWGKLTLGTYISLIAENSTNAPYVLIGTGTTIVVFGLFGCFATCRGSPWMLKLYAMFLSLVFLAELVAGISGFVFRHEIKDTFLRTYTDAMQTYNGNDERSRAVDHVQRSLSCCGVQNYTNWSTSPYFLEHGIPPSCCMNETDCNPQDLHNLTVAATKVNQKGCYDLVTSFMETNMGIIAGVAFGIAFSQLIGMLLACCLSRFITANQYEMV

SEQ ID NO: 258 - protein, 948 aa, homo sapiens
PLFLFSFSQGESRILRVKVVSGIDLAKKDIFGASDPYVKLSLYVADENRELALVQTKTIKKTLNPKWNEEFYFRVNPSNHRLLFEVFDENRLTRDDFLGQVDVPLSHLPTEDPTMERPYTFKDFLLRPRSHKSRVKGFLRLKMAYMPKNGGQDEENSDQRDDMEHGWEVVDSNDSASQHQEELPPPPLPPGWEEKVDNLGRTYYVNHNNRTTQWHRPSLMDVSSESDNNIRQINQEAAHRRFRSRRHISEDLEPEPSEGGDVPEPWETISEEVNIAGDSLGLALPPPPASPGSRTSPQELSEELSRRLQITPDSNGEQFSSLIQREPSSRLRSCSVTDAVAEQGHLPPPSVAYVHTTPGLPSGWEERKDAKGRTYYVNHNNRTTTWTRPIMQLAEDGASGSATNSNNHLIEPQIRRPRSLSSPTVTLSAPLEGAKDSPVRRAVKDTLSNPQSPQPSPYNSPKPQHKVTQSFLPPGWEMRIAPNGRPFFIDHNTKTTTWEDPRLKFPVHMRSKTSLNPNDLGPLPPGWEERIHLDGRTFYIDHNSKITQWEDPRLQNPAITGPAVPYSREFKQKYDYFRKKLKKPADIPNRFEMKLHRNNIFEESYRRIMSVKRPDVLKARLWIEFESEKGLDYGGVAREWFFLLSKEMFNPYYGLFEYSATDNYTLQINPNSGLCNEDHLSYFTFIGRVAGLAVFHGKLLDGFFIRPFYKMMLGKQITLNDMESVDSEYYNSLKWILENDPTELDLMFCIDEENFGQTYQVDLKPNGSEIMVTNENKREYIDLVIQWRFVNRVQKQMNAFLEGFTELLPIDLIKIFDENELELLMCGLGDVDVNDWRQHSIYKNGYCPNHPVIQWFWKAVLLMDAEKRIRLLQFVTGTSRVPMNGFAELYGSNGPQLFTIEQWGSPEKLPRAHTCFNRLDLPPYETFEDLREKLLMAVENAQGFEGVD

SEQ ID NO: 259 - protein, 287 aa, homo sapiens
MAAPRQIPSHIVRLKPSCSTDSSFTRTPVPTVSLASRELPVSSWQVTEPSSKNLWEQICKEYEAEQPPFPEGYKVKQEPVITVAPVEEMLFHGFSAEHYFPVSHFTMISRTPCPQDKSETINPKTCSPKEYLETFIFPVLLPGMASLLHQAKKEKCFERKRTKFIACDFLTEWLYNQNPKRAGEPFTEFFSIPFVEERLKQHPRPPIPLSLLLTEEEAALYIQSFWRACVVRCDPEIQELRQWQKKLREAKHIHQQVKIFWAKQEQKVKCKMEDDAVPAAKMKIPSS

SEQ ID NO: 260 - protein, 798 aa, homo sapiens
MAWDMCNQDSESVWSDIECAALVGEDQPLCPDLPELDLSELDVNDLDTDSFLGGLKWCSDQSEIISNQYNNEPSNIFEKIDEENEANLLAVLTETLDSLPVDEDGLPSFDALTDGDVTTDNEASPSSMPDGTPPPQEAEEPSLLKKLLLAPANTQLSYNECSGLSTQNHANHNHRIRTNPAIVKTENSWSNKAKSICQQQKPQRRPCSELLKYLTTNDDPPHTKPTENRNSSRDKCTSKKKSHTQSQSQHLQAKPTTLSLPLTPESPNDPKGSPFENKTIERTLSVELSGTAGLTPPTTPPHKANQDNPFRASPKLKSSCKTVVPPPSKKPRYSESSGTQGNNSTKKGPEQSELYAQLSKSSVLTGGHEERKTKRPSLRLFGDHDYCQSINSKTEILINISQELQDSRQLENKDVSSDWQGQICSSTDSDQCYLRETLEASKQVSPCSTRKQLQDQEIRAELNKHFGHPSQAVFDDEADKTGELRDSDFSNEQFSKLPMFINSGLAMDGLFDDSEDESDKLSYPWDGTQSYSLFNVSPSCSSFNSPCRDSVSPPKSLFSQRPQRMRSRSRSFSRHRSCSRSPYSRSRSRSPGSRSSSRSCYYYESSHYRHRTHRNSPLYVRSRSRSPYSRRPRYDSYEEYQHERLKREEYRREYEKRESERAKQRERQRQKAIEERRVIYVGKIRPDTTRTELRDRFEVFGEIEECTVNLRDDGDSYGFITYRYTCDAFAALENGYTLRRSNETDFELYFCGRKQFFKSNYADLDSNSDDFDPASTKSKYDSLDFDSLLKEAQRSLRR

SEQ ID NO: 261 - protein, 633 aa, homo sapiens
MLMRKVPGFVPASPWGLRLPQKFLFLLFLSGLVTLCFGALFLLPHSSRLKRLFLAPRTQQPGLEVVAEIAGHAPAREQEPPPNPAPAAPAPGEDDPSSWASPRRRKGGLRRTRPTGPREEATAARGNSIPASRPGDEGVPFRFDFNAFRSRLRHPVLGTRADESQEPQSQVRAQREKIKEMMQFAWQSYKRYAMGKNELRPLTKDGYEGNMFGGLSGATVIDSLDTLYLMELKEEFQEAKAWVGESFHLNVSGEASLFEVNIRYIGGLLSAFYLTGEEVFRIKAIRLGEKLLPAFNTPTGIPKGVVSFKSGNWGWATAGSSSILAEFGSLHLEFLHLTELSGNQVFAEKARKVRNIRKVLRKIEKPFGLYPNFLSPVSGNWVQHHVSVGGLGDSFYEYLIKSWLMSGKTDMEAKNMYYEALEAIETYLLNVSPGGLTYIAEWRGGILDHKMGHLACFSGGMIALGAEDAKEEKRAHYRELAAQITKTCHESYARSDTKLGPEAFWFNSGREAVATQLSESYYILRPEVVESYMYLWRQTHNPIYREWGWEVVLALEKYCRTEAGFSGIQDVYSSTPNHDNKQQSFFLAETLKYLYLLFSEDDLLSLEDWVFNTEAHPLPVNHSDSSGRAWGRH

SEQ ID NO: 262 - protein, 413 aa, homo sapiens
MAPPSVFAEVPQAQPVLVFKLTADFREDPDPRKVNLGVGAYRTDDCHPWVLPVVKKVEQKIANDNSLNHEYLPILGLAEFRSCASRLALGDDSPALKEKRVGGVQSLGGTGALRIGADFLARWYNGTNNKNTPVYVSSPTWENHNAVFSAAGFKDIRSYRYWDAEKRGLDLQGFLNDLENAPEFSIVVLHACAHNPTGIDPTPEQWKQIASVMKHRFLFPFFDSAYQGFASGNLERDAWAIRYFVSEGFEFFCAQSFSKNFGLYNERVGNLTVVGKEPESILQVLSQMEKIVRITWSNPPAQGARIVASTLSNPELFEEWTGNVKTMADRILTMRSELRARLEALKTPGTWNHITDQIGMFSFTGLNPKQVEYLVNEKHIYLLPSGRINVSGLTTKNLDYVATSIHEAVTKIQ

SEQ ID NO: 263 - protein, 482 aa, homo sapiens
MARLLRSATWELFPWRGYCSQKAKGELCRDFVEALKAVVGGSHVSTAAVVREQHGRDESVHRCEPPDAVVWPQNVEQVSRLAALCYRQGVPIIPFGTGTGLEGGVCAVQGGVCVNLTHMDRILELNQEDFSVVVEPGVTRKALNAHLRDSGLWFPVDPGADASLCGMAATGASGTNAVRYGTMRDNVLNLEVVLPDGRLLHTAGRGRHFRKSAAGYNLTGLFVGSEGTLGLITATTLRLHPAPEATVAATCAFPSVQAAVDSTVHILQAAVPVARIEFLDEVMMDACNRYSKLNCLVAPTLFLEFHGSQQALEEQLQRTEEIVQQNGASDFSWAKERSAAGFGQHGTMPGTALATRPGCKGYSTDVCVPISRLPEIVVQTKEDLNASGLTGSIVGHVGDGNFHCILLVNPDDAEELGRVKAFAEQLGRRALALHGTCTGEHGIGMGKRQLLQEEVGAVGVETMRQLKAVLDPQGLMNPGKVL

SEQ ID NO: 264 - protein, 402 aa, homo sapiens
MKETRGYGGDAPFCTRLNHSYTGMWAPERSAEARGNLTRPPGSGEDCGSVSVAFPITMLLTGFVGNALAMLLVSRSYRRRESKRKKSFLLCIGWLALTDLVGQLLTTPVVIVVYLSKQRWEHIDPSGRLCTFFGLTMTVFGLSSLFIASAMAVERALAIRAPHWYASHMKTRATRAVLLGVWLAVLAFALLPVLGVGQYTVQWPGTWCFISTGRGGNGTSSSHNWGNLFFASAFAFLGLLALTVTFSCNLATIKALVSRCRAKATASQSSAQWGRITTETAIQLMGIMCVLSVCWSPLLIMMLKMIFNQTSVEHCKTHTEKQKECNFFLIAVRLASLNQILDPWVYLLLRKILLRKFCQMRKRRLREQEMGPDGRCFCHAWRQVPRTWCSSHDREPCSVQLS

SEQ ID NO: 265 - protein, 327 aa, homo sapiens
MMLIPTHHFRNIERKPEYLQPEKCVPPPYPGPVGTMWFIRDGCGIACAIVTWFLVLYAEFVVLFVMLIPSRDYVYSIINGIVFNLLAFLALASHCRAMLTDPGAVPKGNATKEFIESLQLKPGQVVYKCPKCCSIKPDRAHHCSVCKRCIRKMDHHCPWVNNCVGENNQKYFVLFTMYIALISLHALIMVGFHFLHCFEEDWTTYGLNREEMAETGISLHEKMQPLNFSSTECSSFSPPTTVILLILLCFEGLLFLIFTSVMFGTQVHSICTDETGIEQLKKEERRWAKKTKWMNMKAVFGHPFSLGWASPFATPDQGKADPYQYVV

SEQ ID NO: 266 - protein, 400 aa, homo sapiens
MSQVLGKPQPQDEDDAEEEEEEDELVGLADYGDGPDSSDADPDSGTEEGVLDFSDPFSTEVKPRILLMGLRRSGKSSIQKVVFHKMSPNETLFLESTNKICREDVSNSSFVNFQIWDFPGQIDFFDPTFDYEMIFRGTGALIFVIDSQDDYMEALARLHLTVTRAYKVNTDINFEVFIHKVDGLSDDHKIETQRDIHQRANDDLADAGLEKIHLSFYLTSIYDHSIFEAFSKVVQKLIPQLPTLENLLNIFISNSGIEKAFLFDVVSKIYIATDSTPVDMQTYELCCDMIDVVIDISCIYGLKEDGAGTPYDKESTAIIKLNNTTVLYLKEVTKFLALVCFVREESFERKGLIDYNFHCFRKAIHEVFEVRMKVVKSRKVQNRLQKKKRATPNGTPRVLL

SEQ ID NO: 267 - protein, 381 aa, homo sapiens
MPFSNSHNALKLRFPAEDEFPDLSAHNNHMAKVLTPELYAELRAKSTPSGFTLDDVIQTGVDNPGHPYIMTVGCVAGDEESYEVFKDLFDPIIEDRHGGYKPSDEHKTDLNPDNLQGGDDLDPNYVLSSRVRTGRSIRGFCLPPHCSRGERRAIEKLAVEALSSLDGDLAGRYYALKSMTEAEQQQLIDDHFLFDKPVSPLLLASGMARDWPDARGIWHNDNKTFLVWVNEEDHLRVISMQKGGNMKEVFTRFCTGLTQIETLFKSKDYEFMWNPHLGYILTCPSNLGTGLRAGVHIKLPNLGKHEKFSEVLKRLRLQKRGTGGVDTAAVGGVFDVSNADRLGFSEVELVQMVVDGVKLLIEMEQRLEQGQAIDDLMPAQK

SEQ ID NO: 268 - protein, 305 aa, homo sapiens; identical to SEQ ID NO: 252

SEQ ID NO: 269 - protein, 325 aa, homo sapiens
MANALASATCERCKGGFAPAEKIVNSNGELYHEQCFVCAQCFQQFPEGLFYEFEGRKYCEHDFQMLFAPCCHQCGEFIIGRVIKAMNNSWHPECFRCDLCQEVLADIGFVKNAGRHLCRPCHNREKARGLGKYICQKCHAIIDEQPLIFKNDPYHPDHFNCANCGKELTADARELKGELYCLPCHDKMGVPICGACRRPIEGRVVNAMGKQWHVEHFVCAKCEKPFLGHRHYERKGLAYCETHYNQLFGDVCFHCNRVIEGDVVSALNKAWCVNCFACSTCNTKLTLKNKFVEFDMKPVCKKCYEKFPLELKKRLKKLAETLGRK

SEQ ID NO: 270 - protein, 913 aa, homo sapiens
MTSRLRALGGRINNIRTSELPKEKTRSEVICSIHFLDGVVQTFKVTKQDTGQVLLDMVHNHLGVTEKEYFGLQHDDDSVDSPRWLEASKAIRKQLKGGFPCTLHFRVRFFIPDPNTLQQEQTRHLYFLQLKMDICEGRLTCPLNSAVVLASYAVQSHFGDYNSSIHHPGYLSDSHFIPDQNEDFLTKVESLHEQHSGLKQSEAESCYINIARTLDFYGVELHSGRDLHNLDLMIGIASAGVAVYRKYICTSFYPWVNILKISFKRKKFFIHQRQKQAESREHIVAFNMLNYRSCKNLWKSCVEHHTFFQAKKLLPQEKNVLSQYWTMGSRNTKKSVNNQYCKKVIGGMVWNPAMRRSLSVEHLETKSLPSRSPPITPNWRSPRLRHEIRKPRHSSADNLANEMTYITETEDVFYTYKGSLAPQDSDSEVSQNRSPHQESLSENNPAQSYLTQKSSSSVSPSSNAPGSCSPDGVDQQLLDDFHRVTKGGSTEDASQYYCDKNDNGDSYLVLIRITPDEDGKFGFNLKGGVDQKMPLVVSRINPESPADTCIPKLNEGDQIVLINGRDISEHTHDQVVMFIKASRESHSRELALVIRRRAVRSFADFKSEDELNQLFPEAIFPMCPEGGDTLEGSMAQLKKGLESGTVLIQFEQLYRKKPGLAITFAKLPQNLDKNRYKDVLPYDTTRVLLQGNEDYINASYVNMEIPAANLVNKYIATQGPLPHTCAQFWQVVWDQKLSLIVMLTTLTERGRTKCHQYWPDPPDVMNHGGFHIQCQSEDCTIAYVSREMLVTNTQTGEEHTVTHLQYVAWPDHGVPDDSSDFLEFVNYVRSLRVDSEPVLVHCSAGIGRTGVLVTMETAMCLTERNLPIYPLDIVRKMRDQRAMMVQTSSQYKFVCEAILRVYEEGLVQMLDPS

SEQ ID NO: 271 - protein, 2386 aa, homo sapiens
MLRGPGPGLLLLAVQCLGTAVPSTGASKSKRQAQQMVQPQSPVAVSQSKPGCYDNGKHYQINQQWERTYLGNALVCTCYGGSRGFNCESKPEAEETCFDKYTGNTYRVGDTYERPKDSMIWDCTCIGAGRGRISCTIANRCHEGGQSYKIGDTWRRPHETGGYMLECVCLGNGKGEWTCKPIAEKCFDHAAGTSYVVGETWEKPYQGWMMVDCTCLGEGSGRITCTSRNRCNDQDTRTSYRIGDTWSKKDNRGNLLQCICTGNGRGEWKCERHTSVQTTSSGSGPFTDVRAAVYQPQPHPQPPPYGHCVTDSGVVYSVGMQWLKTQGNKQMLCTCLGNGVSCQETAVTQTYGGNSNGEPCVLPFTYNGRTFYSCTTEGRQDGHLWCSTTSNYEQDQKYSFCTDHTVLVQTRGGNSNGALCHFPFLYNNHNYTDCTSEGRRDNMKWCGTTQNYDADQKFGFCPMAAHEEICTTNEGVMYRIGDQWDKQHDMGHMMRCTCVGNGRGEWTCIAYSQLRDQCIVDDITYNVNDTFHKRHEEGHMLNCTCFGQGRGRWKCDPVDQCQDSETGTFYQIGDSWEKYVHGVRYQCYCYGRGIGEWHCQPLQTYPSSSGPVEVFITETPSQPNSHPIQWNAPQPSHISKYILRWRPKNSVGRWKEATIPGHLNSYTIKGLKPGVVYEGQLISIQQYGHQEVTRFDFTTTSTSTPVTSNTVTGETTPFSPLVATSESVTEITASSFVVSWVSASDTVSGFRVEYELSEEGDEPQYLDLPSTATSVNIPDLLPGRKYIVNVYQISEDGEQSLILSTSQTTAPDAPPDTTVDQVDDTSIVVRWSRPQAPITGYRIVYSPSVEGSSTELNLPETANSVTLSDLQPGVQYNITIYAVEENQESTPVVIQQETTGTPRSDTVPSPRDLQFVEVTDVKVTIMWTPPESAVTGYRVDVIPVNLPGEHGQRLPISRNTFAEVTGLSPGVTYYFKVFAVSHGRESKPLTAQQTTKLDAPTNLQFVNETDSTVLVRWTPPRAQITGYRLTVGLTRRGQPRQYNVGPSVSKYPLRNLQPASEYTVSLVAIKGNQESPKATGVFTTLQPGSSIPPYNTEVTETTIVITWTPAPRIGFKLGVRPSQGGEAPREVTSDSGSIVVSGLTPGVEYVYTIQVLRDGQERDAPIVNKVVTPLSPPTNLHLEANPDTGVLTVSWERSTTPDITGYRITTTPTNGQQGNSLEEVVHADQSSCTFDNLSPGLEYNVSVYTVKDDKESVPISDTIIPAVPPPTDLRFTNIGPDTMRVTWAPPPSIDLTNFLVRYSPVKNEEDVAELSISPSDNAVVLTNLLPGTEYVVSVSSVYEQHESTPLRGRQKTGLDSPTGIDFSDITANSFTVHWIAPRATITGYRIRHHPEHFSGRPREDRVPHSRNSITLTNLTPGTEYVVSIVALNGREESPLLIGQQSTVSDVPRDLEVVAATPTSLLISWDAPAVTVRYYRITYGETGGNSPVQEFTVPGSKSTATISGLKPGVDYTITVYAVTGRGDSPASSKPISINYRTEIDKPSQMQVTDVQDNSISVKWLPSSSPVTGYRVTTTPKNGPGPTKTKTAGPDQTEMTIEGLQPTVEYVVSVYAQNPSGESQPLVQTAVTNIDRPKGLAFTDVDVDSIKIAWESPQGQVSRYRVTYSSPEDGIHELFPAPDGEEDTAELQGLRPGSEYTVSVVALHDDMESQPLIGTQSTAIPAPTDLKFTQVTPTSLSAQWTPPNVQLTGYRVRVTPKEKTGPMKEINLAPDSSSVVVSGLMVATKYEVSVYALKDTLTSRPAQGVVTTLENVSPPRRARVTDATETTITISWRTKTETITGFQVDAVPANGQTPIQRTIKPDVRSYTITGLQPGTDYKIYLYTLNDNARSSPVVIDASTAIDAPSNLRFLATTPNSLLVSWQPPRARITGYIIKYEKPGSPPREVVPRPRPGVTEATITGLEPGTEYTIYVIALKNNQKSEPLIGRKKTDELPQLVTLPHPNLHGPEILDVPSTVQKTPFVTHPGYDTGNGIQLPGTSGQQPSVGQQMIFEEHGFRRTTPPTTATPIRHRPRPYPPNVGEEIQIGHIPREDVDYHLYPHGPGLNPNASTGQEALSQTTISWAPFQDTSEYIISCHPVGTDEEPLQFRVPGTSTSATLTGLTRGATYNVIVEALKDQQRHKVREEVVTVGNSVNEGLNQPTDDSCFDPYTVSHYAVGDEWERMSESGFKLLCQCLGFGSGHFRCDSSRWCHDNGVNYKIGEKWDRQGENGQMMSCTCLGNGKGEFKCDPHEATCYDDGKTYHVGEQWQKEYLGAICSCTCFGGQRGWRCDNCRRPGGEPSPEGTTGQSYNQYSQRYHQRTNTNVNCPIECFMPLDVQADREDSRE

SEQ ID NO: 272 - protein, 2355 aa, homo sapiens
MLRGPGPGLLLLAVQCLGTAVPSTGASKSKRQAQQMVQPQSPVAVSQSKPGCYDNGKHYQINQQWERTYLGNALVCTCYGGSRGFNCESKPEAEETCFDKYTGNTYRVGDTYERPKDSMIWDCTCIGAGRGRISCTIANRCHEGGQSYKIGDTWRRPHETGGYMLECVCLGNGKGEWTCKPIAEKCFDHAAGTSYVVGETWEKPYQGWMMVDCTCLGEGSGRITCTSRNRCNDQDTRTSYRIGDTWSKKDNRGNLLQCICTGNGRGEWKCERHTSVQTTSSGSGPFTDVRAAVYQPQPHPQPPPYGHCVTDSGVVYSVGMQWLKTQGNKQMLCTCLGNGVSCQETAVTQTYGGNSNGEPCVLPFTYNGRTFYSCTTEGRQDGHLWCSTTSNYEQDQKYSFCTDHTVLVQTRGGNSNGALCHFPFLYNNHNYTDCTSEGRRDNMKWCGTTQNYDADQKFGFCPMAAHEEICTTNEGVMYRIGDQWDKQHDMGHMMRCTCVGNGRGEWTCIAYSQLRDQCIVDDITYNVNDTFHKRHEEGHMLNCTCFGQGRGRWKCDPVDQCQDSETGTFYQIGDSWEKYVHGVRYQCYCYGRGIGEWHCQPLQTYPSSSGPVEVFITETPSQPNSHPIQWNAPQPSHISKYILRWRPKNSVGRWKEATIPGHLNSYTIKGLKPGVVYEGQLISIQQYGHQEVTRFDFTTTSTSTPVTSNTVTGETTPFSPLVATSESVTEITASSFVVSWVSASDTVSGFRVEYELSEEGDEPQYLDLPSTATSVNIPDLLPGRKYIVNVYQISEDGEQSLILSTSQTTAPDAPPDTTVDQVDDTSIVVRWSRPQAPITGYRIVYSPSVEGSSTELNLPETANSVTLSDLQPGVQYNITIYAVEENQESTPVVIQQETTGTPRSDTVPSPRDLQFVEVTDVKVTIMWTPPESAVTGYRVDVIPVNLPGEHGQRLPISRNTFAEVTGLSPGVTYYFKVFAVSHGRESKPLTAQQTTKLDAPTNLQFVNETDSTVLVRWTPPRAQITGYRLTVGLTRRGQPRQYNVGPSVSKYPLRNLQPASEYTVSLVAIKGNQESPKATGVFTTLQPGSSIPPYNTEVTETTIVITWTPAPRIGFKLGVRPSQGGEAPREVTSDSGSIVVSGLTPGVEYVYTIQVLRDGQERDAPIVNKVVTPLSPPTNLHLEANPDTGVLTVSWERSTTPDITGYRITTTPTNGQQGNSLEEVVHADQSSCTFDNLSPGLEYNVSVYTVKDDKESVPISDTIIPAVPPPTDLRFTNIGPDTMRVTWAPPPSIDLTNFLVRYSPVKNEEDVAELSISPSDNAVVLTNLLPGTEYVVSVSSVYEQHESTPLRGRQKTGLDSPTGIDFSDITANSFTVHWIAPRATITGYRIRHHPEHFSGRPREDRVPHSRNSITLTNLTPGTEYVVSIVALNGREESPLLIGQQSTVSDVPRDLEVVAATPTSLLISWDAPAVTVRYYRITYGETGGNSPVQEFTVPGSKSTATISGLKPGVDYTITVYAVTGRGDSPASSKPISINYRTEIDKPSQMQVTDVQDNSISVKWLPSSSPVTGYRVTTTPKNGPGPTKTKTAGPDQTEMTIEGLQPTVEYVVSVYAQNPSGESQPLVQTAVTNIDRPKGLAFTDVDVDSIKIAWESPQGQVSRYRVTYSSPEDGIHELFPAPDGEEDTAELQGLRPGSEYTVSVVALHDDMESQPLIGTQSTAIPAPTDLKFTQVTPTSLSAQWTPPNVQLTGYRVRVTPKEKTGPMKEINLAPDSSSVVVSGLMVATKYEVSVYALKDTLTSRPAQGVVTTLENVSPPRRARVTDATETTITISWRTKTETITGFQVDAVPANGQTPIQRTIKPDVRSYTITGLQPGTDYKIYLYTLNDNARSSPVVIDASTAIDAPSNLRFLATTPNSLLVSWQPPRARITGYIIKYEKPGSPPREVVPRPRPGVTEATITGLEPGTEYTIYVIALKNNQKSEPLIGRKKTDELPQLVTLPHPNLHGPEILDVPSTVQKTPFVTHPGYDTGNGIQLPGTSGQQPSVGQQMIFEEHGFRRTTPPTTATPIRHRPRPYPPNVGQEALSQTTISWAPFQDTSEYIISCHPVGTDEEPLQFRVPGTSTSATLTGLTRGATYNVIVEALKDQQRHKVREEVVTVGNSVNEGLNQPTDDSCFDPYTVSHYAVGDEWERMSESGFKLLCQCLGFGSGHFRCDSSRWCHDNGVNYKIGEKWDRQGENGQMMSCTCLGNGKGEFKCDPHEATCYDDGKTYHVGEQWQKEYLGAICSCTCFGGQRGWRCDNCRRPGGEPSPEGTTGQSYNQYSQRYHQRTNTNVNCPIECFMPLDVQADREDSRE

SEQ ID NO: 273 - protein, 439 aa, homo sapiens
MPAIAVLAAAAAAWCFLQVESRHLDALAGGAGPNHGNFLDNDQWLSTVSQYDRDKYWNRFRDDDYFRNWNPNKPFDQALDPSKDPCLKVKCSPHKVCVTQDYQTALCVSRKHLLPRQKKGNVAQKHWVGPSNLVKCKPCPVAQSAMVCGSDGHSYTSKCKLEFHACSTGKSLATLCDGPCPCLPEPEPPKHKAERSACTDKELRNLASRLKDWFGALHEDANRVIKPTSSNTAQGRFDTSILPICKDSLGWMFNKLDMNYDLLLDPSEINAIYLDKYEPCIKPLFNSCDSFKDGKLSNNEWCYCFQKPGGLPCQNEMNRIQKLSKGKSLLGAFIPRCNEEGYYKATQCHGSTGQCWCVDKYGNELAGSRKQGAVSCEEEQETSGDFGSGGSVVLLDDLEYERELGPKDKEGKLRVHTRAVTEDDEDEDDDKEDEVGYIW

SEQ ID NO: 274 - protein, 738 aa, homo sapiens
MTSSGPGPRFLLLLPLLLPPAASASDRPRGRDPVNPEKLLVITVATAETEGYLRFLRSAEFFNYTVRTLGLGEEWRGGDVARTVGGGQKVRWLKKEMEKYADREDMIIMFVDSYDVILAGSPTELLKKFVQSGSRLLFSAESFCWPEWGLAEQYPEVGTGKRFLNSGGFIGFATTIHQIVRQWKYKDDDDDQLFYTRLYLDPGLREKLSLNLDHKSRIFQNLNGALDEVVLKFDRNRVRIRNVAYDTLPIVVHGNGPTKLQLNYLGNYVPNGWTPEGGCGFCNQDRRTLPGGQPPPRVFLAVFVEQPTPFLPRFLQRLLLLDYPPDRVTLFLHNNEVFHEPHIADSWPQLQDHFSAVKLVGPEEALSPGEARDMAMDLCRQDPECEFYFSLDADAVLTNLQTLRILIEENRKVIAPMLSRHGKLWSNFWGALSPDEYYARSEDYVELVQRKRVGVWNVPYISQAYVIRGDTLRMELPQRDVFSGSDTDPDMAFCKSFRDKGIFLHLSNQHEFGRLLATSRYDTEHLHPDLWQIFDNPVDWKEQYIHENYSRALEGEGIVEQPCPDVYWFPLLSEQMCDELVAEMEHYGQWSGGRHEDSRLAGGYENVPTVDIHMKQVGYEDQWLQLLRTYVGPMTESLFPGYHTKARAVMNFVVRYRPDEQPSLRPHHDSSTFTLNVALNHKGLDYEGGGCRFLRYDCVISSPRKGWALLHPGRLTHYHEGLPTTWGTRYIMVSFVDP

SEQ ID NO: 275 - protein, 788 aa, homo sapiens [sequence omitted]

SEQ ID NO: 276 - protein, 163 aa, homo sapiens
MSLLLLVVSALHILILILLFVATLDKSWWTLPGKESLNLWYDCTWNNDTKTWACSNVSENGWLKAVQVLMVLSLILCCLSFILFMFQLYTMRRGGLFYATGLCQLCTSVAVFTGALIYAIHAEEILEKHPRGGSFGYCFALAWVAFPLALVSGIIYIHLRKRE

SEQ ID NO: 277 - protein, 507 aa, homo sapiens
MAGAGPKRRALAAPAAEEKEEAREKMLAAKSADGSAPAGEGEGVTLQRNITLLNGVAIIVGTIIGSGIFVTPTGVLKEAGSPGLALVVWAACGVFSIVGALCYAELGTTISKSGGDYAYMLEVYGSLPAFLKLWIELLIIRPSSQYIVALVFATYLLKPLFPTCPVPEEAAKLVACLCVLLLTAVNCYSVKAATRVQDAFAAAKLLALALIILLGFVQIGKGDVSNLDPNFSFEGTKLDVGNIVLALYSGLFAYGGWNYLNFVTEEMINPYRNLPLAIIISLPIVTLVYVLTNLAYFTTLSTEQMLSSEAVAVDFGNYHLGVMSWIIPVFVGLSCFGSVNGSLFTSSRLFFVGSREGHLPSILSMIHPQLLTPVPSLVFTCVMTLLYAFSKDIFSVINFFSFFNWLCVALAIIGMIWLRHRKPELERPIKVNLALPVFFILACLFLIAVSFWKTPVECGIGFTIILSGLPVYFFGVWWKNKPKWLLQGIFSTTVLCQKLMQVVPQET

SEQ ID NO: 278 - protein, 742 aa, homo sapiens
MDKFWWHAAWGLCLVPLSLAQIDLNITCRFAGVFHVEKNGRYSISRTEAADLCKAFNSTLPTMAQMEKALSIGFETCRYGFIEGHVVIPRIHPNSICAANNTGVYILTSNTSQYDTYCFNASAPPEEDCTSVTDLPNAFDGPITITIVNRDGTRYVQKGEYRTNPEDIYPSNPTDDDVSSGSSSERSSTSGGYIFYTFSTVHPIPDEDSPWITDSTDRIPATTLMSTSATATETATKRQETWDWFSWLFLPSESKNHLHTTTQMAGTSSNTISAGWEPNEENEDERDRHLSFSGSGIDDDEDFISSTISTTPRAFDHTKQNQDWTQWNPSHSNPEVLLQTTTRMTDVDRNGTTAYEGNWNPEAHPPLIHHEHHEEEETPHSTSTIQATPSSTTEETATQKEQWFGNRWHEGYRQTPKEDSHSTTGTAAASAHTSHPMQGRTTPSPEDSSWTDFFNPISHPMGRGHQAGRRMDMDSSHSITLQPTANPNTGLVEDLDRTGPLSMTTQQSNSQSFSTSHEGLEEDKDHPTTSTLTSSNRNDVTGGRRDPNHSEGSTTLLEGYTSHYPHTKESRTFIPVTSAKTGSFGVTAVTVGDSNSNVNRSLSGDQDTFHPSGGSHTTHGSESDGHSHGSQEGGANTTSGPIRTPQIPEWLIILASLLALALILAVCIAVNSRRRCGQKKKLVINSGNGAVEDRKPSGLNGEASKSQEMVHLVNKESSETPDQFMTADETRNLQNVDMKIGV

SEQ ID NO: 279 - protein, 619 aa, homo sapiens
MSVAHMSLQAAAALLKGRSVLDATGQRCRVVKRSFAFPSFLEEDVVDGADTFDSSFFSKASMGSMPDDVFESPPLSASYFRGIPHSASPVSPDGVQIPLKEYGRAPVPGPRRGKRIASKVKHFAFDRKKRHYGLGVVGNWLNRSYRRSISSTVQRQLESFDSHRPYFTYWLTFVHVIITLLVICTYGIAPVGFAQHVTTQLVLRNKGVYESVKYIQQENFWVGPSSIDLIHLGAKFSPCIRKDGQIEQLVLRERDLERDSGCCVQNDHSGCIQTQRKDCSETLATFVKWQDDTGPPMDKSDLGQKRTSGAVCHQDPRTCEEPASSGAHIWPDDITKWPICTEQARSNHTGFLHMDCEIKGRPCCIGTKGSCEITTREYCEFMHGYFHEEATLCSQVHCLDKVCGLLPFLNPEVPDQFYRLWLSLFLHAGVVHCLVSVVFQMTILRDLEKLAGWHRIAIIFILSGITGNLASAIFLPYRAEVGPAGSQFGLLACLFVELFQSWPLLERPWKAFLNLSAIVLFLFICGLLPWIDNIAHIFGFLSGLLLAFAFLPYITFGTSDKYRKRALILVSLLAFAGLFAALVLWLYIYPINWPWIEHLTCFPFTSRFCEKYELDQVLH

SEQ ID NO: 280 - protein, 445 aa, homo sapiens
GHQGPPGPDECEILDIIMKMCSCCECKCGPIDLLFVLDSSESIGLQNFEIAKDFVVKVIDRLSRDELVKFEPGQSYAGVVQYSHSQMQEHVSLRSPSIRNVQELKEAIKSLQWMAGGTFTGEALQYTRDQLLPPSPNNRIALVITDGRSDTQRDTTPLNVLCSPGIQVVSVGIKDVFDFIPGSDQLNVISCQGLAPSQGRPGLSLVKENYAELLEDAFLKNVTAQICIDKKCPDYTCPITFSSPADITILLDGSASVGSHNFDTTKRFAKRLAERFLTAGRTDPAHDVRVAVVQYSGTGQQRPERASLQFLQNYTALASAVDAMDFINDATDVNDALGYVTRFYREASSGAAKKRLLLFSDGNSQGATPAAIEKAVQEAQRAGIEIFVVVVGRQVNEPHIRVLVTGKTAEYDVAYGESHLFRVPSYQALLRGVFHQTVSRKVALG

SEQ ID NO: 281 - protein, 4576 aa, homo sapiens
MSGEDAEVRAVSEDVSNGSSGSPSPGDTLPWNLGKTQRSRRSGGGAGSNGSVLDPAERAVIRIADERDRVKKTFTKWVNKHLIKAQRHISDLYEDLRDGHNLISLLEVLSGDSLPREKGRMRFHKLQNVQIALDYLRHRQVKLVNIRNDDIADGNPKLTLGLIWTIILHFQISDIQVSGQSEDMTAKEKLLLWSQRMVEGYQGLRCDNFTSSWRDGRLFNAIIHRHKPLLIDMNKVYRQTNLENLDQAFSVAERDLGVTRLLDPEDVDVPQPDEKSIITYVSSLYDAMPRVPDVQDGVRANELQLRWQEYRELVLLLLQWMRHHTAAFEERRFPSSFEEIEILWSQFLKFKEMELPAKEADKNRSKGIYQSLEGAVQAGQLKVPPGYHPLDVEKEWGKLHVAILEREKQLRSEFERLECLQRIVTKLQMEAGLCEEQLNQADALLQSDVRLLAAGKVPQRAGEVERDLDKADSMIRLLFNDVQTLKDGRHPQGEQMYRRVYRLHERLVAIRTEYNLRLKAGVAAPATQVAQVTLQSVQRRPELEDSTLRYLQDLLAWVEENQHRVDGAEWGVDLPSVEAQLGSHRGLHQSIEEFRAKIERARSDEGQLSPATRGAYRDCLGRLDLQYAKLLNSSKARLRSLESLHSFVAAATKELMWLNEKEEEEVGFDWSDRNTNMTAKKESYSALMRELELKEKKIKELQNAGDRLLREDHPARPTVESFQAALQTQWSWMLQLCCCIEAHLKENAAYFQFFSDVREAEGQLQKLQEALRRKYSCDRSATVTRLEDLLQDAQDEKEQLNEYKGHLSGLAKRAKAVVQLKPRHPAHPMRGRLPLLAVCDYKQVEVTVHKGDECQLVGPAQPSHWKVLSSSGSEAAVPSVCFLVPPPNQEAQEAVTRLEAQHQALVTLWHQLHVDMKSLLAWQSLRRDVQLIRSWSLATFRTLKPEEQRQALHSLELHYQAFLRDSQDAGGFGPEDRLMAEREYGSCSHHYQQLLQSLEQGAQEESRCQRCISELKDIRLQLEACETRTVHRLRLPLDKEPARECAQRIAEQQAGAKAQAEVEGLGKGVARLSAEAEKVLALPEPSPAAPTLRSELELTLGKLEQVRSLSAIYLEKLKTISLVIRGTQGAEEVLRAHEEQLKEAQAVPATLPELEATKASLKKLRAQAEAQQPTFDALRDELRGAQEVGERLQQRHGERDVEVERWRERVAQLLERWQAVLAQTDVRQRELEQLGRQLRYYRESADPLGAWLQDARRRQEQIQAMPLADSQAVREQLRQEQALLEEIERHGEKVEECQRFAKQYINAIKDYELQLVTYKAQLEPVASPAKKPKVQSGSESVIQEYVDLRTHYSELTTLTSQYIKFISETLRRMEEEERLAEQQRAEERERLAEVEAALEKQRQLAEAHAQAKAQAEREAKELQQRMQEEVVRREEAAVDAQQQKRSIQEELQQLRQSSEAEIQAKARQAEAAERSRLRIEEEIRVVRLQLEATERQRGGAEGELQALRARAEEAEAQKRQAQEEAERLRRQVQDESQRKRQAEVELASRVKAEAEAAREKQRALQALEELRLQAEEAERRLRQAEVERARQVQVALETAQRSAEAELQSKRASFAEKTAQLERSLQEEHVAVAQLREEAERRAQQQAEAERAREEAERELERWQLKANEALRLRLQAEEVAQQKSLAQAEAEKQKEEAEREARRRGKAEEQAVRQRELAEQELEKQRQLAEGTAQQRLAAEQELIRLRAETEQGEQQRQLLEEELARLQREAAAATQKRQELEAELAKVRAEMEVLLASKARAEEESRSTSEKSKQRLEAEAGRFRELAEEAARLRALAEEAKRQRQLAEEDAARQRAEAERVLAEKLAAIGEATRLKTEAEIALKEKEAENERLRRLAEDEAFQRRRLEEQAAQHKADIEERLAQLRKASDSELERQKGLVEDTLRQRRQVEEEILALKASFEKAAAGKAELELELGRIRSNAEDTLRSKEQAELEAARQRQLAAEEERRRREAEERVQKSLAAEEEAARQRKAALEEVERLKAKVEEARRLRERAEQESARQLQLAQEAAQKRLQAEEKAHAFAVQQKEQELQQTLQQEQSVLDQLRGEAEAARRAAEEAEEARVQAEREAAQSRRQVEEAERLKQSAEEQAQARAQAQAAAEKLRKEAEQEAARRAQAEQAALRQKQAADAEMEKHKKFAEQTLRQKAQVEQELTTLRLQLEETDHQKNLLDEELQRLKAEATEAARQRSQVEEELFSVRVQMEELSKLKARIEAENRALILRDKDNTQRFLQEEAEKMKQVAEEAARLSVAAQEAARLRQLAEEDLAQQRALAEKMLKEKMQAVQEATRLKAEAELLQQQKELAQEQARRLQEDKEQMAQQLAEETQGFQRTLEAERQRQLEMSAEAERLKLRVAEMSRAQARAEEDAQRFRKQAEEIGEKLHRTELATQEKVTLVQTLEIQRQQSDHDAERLREAIAELEREKEKLQQEAKLLQLKSEEMQTVQQEQLLQETQALQQSFLSEKDSLLQRERFIEQEKAKLEQLFQDEVAKAQQLREEQQRQQQQMEQERQRLVASMEEARRRQHEAEEGVRRKQEELQQLEQQRRQQEELLAEENQRLREQLQLLEEQHRAALAHSEEVTASQVAATKTLPNGRDALDGPAAEAEPEHSFDGLRRKVSAQRLQEAGILSAEELQRLAQGHTTVDELARREDVRHYLQGRSSIAGLLLKATNEKLSVYAALQRQLLSPGTALILLEAQAASGFLLDPVRNRRLTVNEAVKEGVVGPELHHKLLSAERAVTGYKDPYTGQQISLFQAMQKGLIVREHGIRLLEAQIATGGVIDPVHSHRVPVDVAYRRGYFDEEMNRVLADPSDDTKGFFDPNTHENLTYLQLLERCVEDPETGLCLLPLTDKAAKGGELVYTDSEARDVFEKATVSAPFGKFQGKTVTIWEIINSEYFTAEQRRDLLRQFRTGRITVEKIIKIIITVVEEQEQKGRLCFEGLRSLVPAAELLESRVIDRELYQQLQRGERSVRDVAEVDTVRRALRGANVIAGVWLEEAGQKLSIYNALKKDLLPSDMAVALLEAQAGTGHIIDPATSARLTVDEAVRAGLVGPEFHEKLLSAEKAVTGYRDPYTGQSVSLFQALKKGLIPREQGLRLLDAQLSTGGIVDPSKSHRVPLDVACARGCLDEETSRALSAPRADAKAYSDPSTGEPATYGELQQRCRPDQLTGLSLLPLSEKAARARQEELYSELQARETFEKTPVEVPVGGFKGRTVTVWELISSEYFTAEQRQELLRQFRTGKVTVEKVIKILITIVEEVETLRQERLSFSGLRAPVPASELLASGVLSRAQFEQLKDGKTTVKDLSELGSVRTLLQGSGCLAGIYLEDTKEKVSIYEAMRRGLLRATTAALLLEAQAATGFLVDPVRNQRLYVHEAVKAGVVGPELHEQLLSAEKAVTGYRDPYSGSTISLFQAMQKGLVLRQHGIRLLEAQIATGGIIDPVHSHRVPVDVAYQRGYFSEEMNRVLADPSDDTKGFFDPNTHENLTYRQLLERCVEDPETGLRLLPLKGAEKAEVVETTQVYTEEETRRAFEETQIDIPGGGSHGGSTMSLWEVMQSDLIPEEQRAQLMADFQAGRVTKERMIIIIIEIIEKTEIIRQQGLASYDYVRRRLTAEDLFEARIISLETYNLLREGTRSLREALEAESAWCYLYGTGSVAGVYLPGSRQTLSIYQALKKGLLSAEVARLLLEAQAATGFLLDPVKGERLTVDEAVRKGLVGPELHDRLLSAERAVTGYRDPYTEQTISLFQAMKKELIPTEEALRLLDAQLATGGIVDPRLGFHLPLEVAYQRGYLNKDTHDQLSEPSEVRSYVDPSTDERLSYTQLLRRCRRDDGTGQLLLPLSDARKLTFRGLRKQITMEELVRSQVMDEATALQLREGLTSIEEVTKNLQKFLEGTSCIAGVFVDATKERLSVYQAMKKGIIRPGTAFELLEAQAATGYVIDPIKGLKLTVEEAVRMGIVGPEFKDKLLSAERAVTGYKDPYSGKLISLFQAMKKGLILKDHGIRLLEAQIATGGIIDPEESHRLPVEVAYKRGLFDEEMNEILTDPSDDTKGFFDPNTEENLTYLQLMERCITDPQTGLCLLPLKEKKRERKTSSKSSVRKRRVVIVDPETGKEMSVYEAYRKGLIDHQTYLELSEQECEWEEITISSSDGVVKSMIIDRRSGRQYDIDDAIAKNLIDRSALDQYRAGTLSITEFADMLSGNAGGFRSRSSSVGSSSSYPISPAVSRTQLASWSDPTEETGPVAGILDTETLEKVSITEAMHRNLVDNITGQRLLEAQACTGGIIDPSTGERFPVTDAVNKGLVDKIMVDRINLAQKAFCGFEDPRTKTKMSAAQALKKGWLYYEAGQRFLEVQYLTGGLIEPDTPGRVPLDEALQRGTVDARTAQKLRDVGAYSKYLTCPKTKLKISYKDALDRSMVEEGTGLRLLEAAAQSTKGYYSPYSVSGSGSTAGSRTGSRTGSRAGSRRGSFDATGSGFSMTFSSSSYSSSGYGRRYASGSSASLGGPESAVA

SEQ ID NO: 282 - protein, 860 aa, homo sapiens [sequence omitted]

SEQ ID NO: 283 - protein, 192 aa, homo sapiens
MQAIKCVVVGDGAVGKTCLLISYTTNAFPGEYIPTVFDNYSANVMVDSKPVNLGLWDTAGQEDYDRLRPLSYPQTDVFLICFSLVSPASYENVRAKWFPEVRHHCPSTPIILVGTKLDLRDDKDTIEKLKEKKLAPITYPQGLALAKEIDSVKYLECSALTQRGLKTVFDEAIRAVLCPQPTRQQKRACSLL

SEQ ID NO: 284 - protein, 480 aa, homo sapiens
MIRAAPPPLFLLLLLLLLLVSWASRGEAAPDQDEIQRLPGLAKQPSFRQYSGYLKGSGSKHLHYWFVESQKDPENSPVVLWLNGGPGCSSLDGLLTEHGPFLVQPDGVTLEYNPYSWNLIANVLYLESPAGVGFSYSDDKFYATNDTEVAQSNFEALQDFFRLFPEYKNNKLFLTGESYAGIYIPTLAVLVMQDPSMNLQGLAVGNGLSSYEQNDNSLVYFAYYHGLLGNRLWSSLQTHCCSQNKCNFYDNKDLECVTNLQEVARIVGNSGLNIYNLYAPCAGGVPSHFRYEKDTVVVQDLGNIFTRLPLKRMWHQALLRSGDKVRMDPPCTNTTAASTYLNNPYVRKALNIPEQLPQWDMCNFLVNLQYRRLYRSMNSQYLKLLSSQKYQILLYNGDVDMACNFMGDEWFVDSLNQKMEVQRRPWLVKYGDSGEQIAGFVKEFSHIAFLTIKGAGHMVPTDKPLAAFTMFSRFLNKQPY

SEQ ID NO: 285 - protein, 508 aa, homo sapiens
MLRRALLCLAVAALVRADAPEEEDHVLVLRKSNFAEALAAHKYLLVEFYAPWCGHCKALAPEYAKAAGKLKAEGSEIRLAKVDATEESDLAQQYGVRGYPTIKFFRNGDTASPKEYTAGREADDIVNWLKKRTGPAATTLPDGAAAESLVESSEVAVIGFFKDVESDSAKQFLQAAEAIDDIPFGITSNSDVFSKYQLDKDGVVLFKKFDEGRNNFEGEVTKENLLDFIKHNQLPLVIEFTEQTAPKIFGGEIKTHILLFLPKSVSDYDGKLSNFKTAAESFKGKILFIFIDSDHTDNQRILEFFGLKKEECPAVRLITLEEEMTKYKPESEELTAERITEFCHRFLEGKIKPHLMSQELPEDWDKQPVKVLVGKNFEDVAFDEKKNVFVEFYAPWCGHCKQLAPIWDKLGETYKDHENIVIAKMDSTANEVEAVKVHSFPTLKFFPASADRTVIDYNGERTLDGFKKFLESGGQDGAGDDDDLEDLEEAEEPDMEEDDDQKAVKDEL

SEQ ID NO: 286 - protein, 246 aa, homo sapiens
MYQVSGQRPSGCDAPYGAPSAAPGPAQTLSLLPGLEVVTGSTHPAEAAPEEGSLEEAATPMPQGNGPGIPQGLDSTDLDVPTEAVTCQPQGNPLGCTPLLPNDSGHPSELGGTRRAGNGALGGPKAHRKLQTHPSLASQGSKKSKSSSKSTTSQIPLQAQEDCCVHCILSCLFCEFLTLCNIVLDCATCGSCSSEDSCLCCCCCGSGECADCDLPCDLDCGILDACCESADCLEICMECCGLCFSS

SEQ ID NO: 287 - protein, 68 aa, homo sapiens
MDQVMQFVEPSRQFVKDSIRLVKRCTKPDRKEFQKIAMATAIGFAIMGFIGFFVKLIHIPINNIIVGG

SEQ ID NO: 288 - protein, 1325 aa, homo sapiens
ICGAQPVPFVPQVLGVMIGAGVAVVVTAVLILLVVRRLRVPKTPAPDGPRYRFRKRDKVLFYGRKIMRKVSQSTSSLVDTSVSATSRPRMRKKLKMLNIAKKILRIQKETPTLQRKEPPPAVLEADLTEGDLANSHLPSEVLYMLKNVRVLGHFEKPLFLELCRHMVFQRLGQGDYVFRPGQPDASIYVVQDGLLELCLPGPDGKECVVKEVVPGDSVNSLLSILDVITGHQHPQRTVSARAARDSTVLRLPVEAFSAVFTKYPESLVRVVQIIMVRLQRVTFLALHNYLGLTNELFSHEIQPLRLFPSPGLPTRTSPVRGSKRMVSTSATDEPRETPGRPPDPTGAPLPGPTGDPVKPTSLETPSAPLLSRCVSMPGDISGLQGGPRSDFDMAYERGRISVSLQEEASGGSLAAPARTPTQEPREQPAGACEYSYCEDESATGGCPFGPYQGRQTSSIFEAAKQELAKLMRIEDPSLLNSRVLLHHAKAGTIIARQGDQDVSLHFVLWGCLHVYQRMIDKAEDVCLFVAQPGELVGQLAVLTGEPLIFTLRAQRDCTFLRISKSDFYEIMRAQPSVVLSAAHTVAARMSPFVRQMDFAIDWTAVEAGRALYRQGDRSDCTYIVLNGRLRSVIQRGSGKKELVGEYGRGDLIGVVEALTRQPRATTVHAVRDTELAKLPEGTLGHIKRRYPQVVTRLIHLLSQKILGNLQQLQGPFPGSGLGVPPHSELTNPASNLATVAILPVCAEVPMVAFTLELQHALQAIGPTLLLNSDIIRARLGASALDSIQEFRLSGWLAQQEDAHRIVLYQTDASLTPWTVRCLRQADCILIVGLGDQEPTLGQLEQMLENTAVRALKQLVLLHREEGAGPTRTVEWLNMRSWCSGHLHLRCPRRLFSRRSPAKLHELYEKVFSRRADRHSDFSRLARVLTGNTIALVLGGGGARGCSHIGVLKALEEAGVPVDLVGGTSIGSFIGALYAEERSASRTKQRAREWAKSMTSVLEPVLDLTYPVTSMFTGSAFNRSIHRVFQDKQIEDLWLPYFNVTTDITASAMRVHKDGSLWRYVRASMTLSGYLPPLCDPKDGHLLMDGGYINNLPGNMGAKTVIAIDVGSQDETDLSTYGDSLSGWWLLWKRLNPWADKVKVPDMAEIQSRLAYVSCVRQLEVVKSSSYCEYLRPPIDCFKTMDFGKFDQIYDVGYQYGKAVFGGWSRGNVIEKMLTDRRSTDLNESRRADVLAFPSSGFTDLAEIVSRIEPPTSYVSDGCADGEESDCLTEYEEDAGPDCSRDEGGSPEGASPSTASEMEEEKSILRQRRCLPQEPPGSATDA

SEQ ID NO: 289 - protein, 1323 aa, homo sapiens [sequence omitted]

SEQ ID NO: 290 - protein, 492 aa, homo sapiens
MVKFPALTHYWPLIRFLVPLGITNIAIDFGEQALNRGIAAVKEDAVEMLASYGLAYSLMKFFTGPMSDFKNVGLVFVNSKRDRTKAVLCMVVAGAIAAVFHTLIAYSDLGYYIINKLHHVDESVGSKTRRAFLYLAAFPFMDAMAWTHAGILLKHKYSFLVGCASISDVIAQVVFVAILLHSHLECREPLLIPILSLYMGALVRCTTLCLGYYKNIHDIIPDRSGPELGGDATIRKMLSFWWPLALILATQRISRPIVNLFVSRDLGGSSAATEAVAILTATYPVGHMPYGWLTEIRAVYPAFDKNNPSNKLVSTSNTVTAAHIKKFTFVCMALSLTLCFVMFWTPNVSEKILIDIIGVDFAFAELCVVPLRIFSFFPVPVTVRAHLTGWLMTLKKTFVLAPSSVLRIIVLIASLVVLPYLGVHGATLGVGSLLAGFVGESTMVAIAACYVYRKQKKKMENESATEGEDSAMTDMPPTEEVTDIVEMREENE

SEQ ID NO: 291 - protein, 733 aa, homo sapiens
MGWMGEKTGKILTEFLQFYEDQYGVALFNSMRHEIEGTGLPQAQLLWRKVPLDERIVFSGNLFQHQEDSKKWRNRFSLVPHNYGLVLYENKAAYERQVPPRAVINSAGYKILTSVDQYLELIGNSLPGTTAKSGSAPILKCPTQFPLILWHPYARHYYFCMMTEAEQDKWQAVLQDCIRHCNNGIPEDSKVEGPAFTDAIRMYRQSKELYGTWEMLCGNEVQILSNLVMEELGPELKAELGPRLKGKPQERQRQWIQISDAVYHMVYEQAKARFEEVLSKVQQVQPAMQAVIRTDMDQIITSKEHLASKIRAFILPKAEVCVRNHVQPYIPSILEALMVPTSQGFTEVRDVFFKEVTDMNLNVINEGGIDKLGEYMEKLSRLAYHPLKMQSCYEKMESLRLDGLQQRFDVSSTSVFKQRAQIHMREQMDNAVYTFETLLHQELGKGPTKEELCKSIQRVLERVLKKYDYDSSSVRKRFFREALLQISIPFLLKKLAPTCKSELPRFQELIFEDFARFILVENTYEEVVLQTVMKDILQAVKEAAVQRKHNLYRDSMVMHNSDPNLHLLAEGAPIDWGEEYSNSGGGGSPSPSTPESATLSEKRRRAKQVVSVVQDEEVGLPFEASPESPPPASPDGVTEIRGLLAQGLRPESPPPAGPLLNGAPAGESPQPKAAPEASSPPASPLQHLLPGKAVDLGPPKPSDQETGEQVSSPSSHPALHTTTEDSAGVQTEF

SEQ ID NO: 292 - protein, 498 aa, homo sapiens
MADESETAVKPPAPPLPQMMEGNGNGHEHCSDCENEEDNSYNRGGLSPANDTGAKKKKKKQKKKKEKGSETDSAQDQPVKMNSLPAERIQEIQKAIELFSVGQGPAKTMEEASKRSYQFWDTQPVPKLGEVVNTHGPVEPDKDNIRQEPYTLPQGFTWDALDLGDRGVLKELYTLLNENYVEDDDNMFRFDYSPEFLLWALRPPGWLPQWHCGVRVVSSRKLVGFISAIPANIHIYDTEKKMVEINFLCVHKKLRSKRVAPVLIREITRRVHLEGIFQAVYTAGVVLPKPVGTCRYWHRSLNPRKLIEVKFSHLSRNMTMQRTMKLYRLPEASAAPGAGLRPMETKDIPVVHQLLTRYLKQFHLTPVMSQEEVEHWFYPQENIIDTFVVENANGEVTDFLSFYTLPSTIMNHPTHKSLKAAYSFYNVHTQTPLLDLMSDALVLAKMKGFDVFNALDLMENKTFLEKLKFGIGDGNLQYYLYNWKCPSMGAEKVGLVLQ

SEQ ID NO: 293 - protein, 204 aa, homo sapiens
MAEQEPTAEQLAQIAAENEEDEHSVNYKPPAQKSIQEIQELDKDDESLRKYKEALLGRVAVSADPNVPNVVVTGLTLVCSSAPGPLELDLTGDLESFKKQSFVLKEGVEYRIKISFRVNREIVSGMKYIQHTYRKGVKIDKTDYMVGSYGPRAEEYEFLTPVEEAPKGMLARGSYSIKSRFTDDDKTDHLSWEWNLTIKKDWKD

SEQ ID NO: 294 - protein, 171 aa, homo sapiens
MSHGAGLVRTTCSSGSALGPGAGAAQPSASPLEGLLDLSYPRTHAALLKVAQMVTLLIAFICVRSSLWTNYSAYSYFEVVTICDLIMILAFYLVHLFRFYRVLTCISWPLSELLHYLIGTLLLLIASIVAASKSYNQSGLVAGAIFGFMATFLCMASIWLSYKISCVTQST

SEQ ID NO: 295 - protein, 498 aa, homo sapiens
MALETPTPGPPREGQSPASQAGTQHPPAQATAHSQSSPEFKGSLASLSDSLGVSVMATDQDSYSTSSTEEELEQFSSPSVKKKPSMILGKARHRLSFASFSSMFHAFLSNNRKLYKKVVELAQDKGSYFGSLVQDYKVYSLEMMARQTSSTEMLQEIRTMMTQLKSYLLQSTELKALVDPALHSEEELEAIVESALYKCVLKPLKEAINSCLHQIHSKDGSLQQLKENQLVILATTTTDLGVTTSVPEVPMMEKILQKFTSMHKAYSPEKKISILLKTCKLIYDSMALGNPGKPYGADDFLPVLMYVLARSNLTEMLLNVEYMMELMDPALQLGEGSYYLTTTYGALEHIKSYDKITVTRQLSVEVQDSIHRWERRRTLNKARASRSSVQDFICVSYLEPEQQARTLASRADTQAQALCAQCAEKFAVERPQAHRLFVLVDGRCFQLADDALPHCIKGYLLRSEPKRDFHFVYRPLDGGGGGGGGSPPCLVVREPNFL

SEQ ID NO: 296 - protein, 712 aa, homo sapiens
MAGGPGPGEPAAPGAQHFLYEVPPWVMCRFYKVMDALEPADWCQFAALIVRDQTELRLCERSGQRTASVLWPWINRNARVADLVHILTHLQLLRARDIITAWHPPAPLPSPGTTAPRPSSIPAPAEAEAWSPRKLPSSASTFLSPAFPGSQTHSGPELGLVPSPASLWPPPPSPAPSSTKPGPESSVSLLQGARPFPFCWPLCEISRGTHNFSEELKIGEGGFGCVYRAVMRNTVYAVKRLKENADLEWTAVKQSFLTEVEQLSRFRHPNIVDFAGYCAQNGFYCLVYGFLPNGSLEDRLHCQTQACPPLSWPQRLDILLGTARAIQFLHQDSPSLIHGDIKSSNVLLDERLTPKLGDFGLARFSRFAGSSPSQSSMVARTQTVRGTLAYLPEEYIKTGRLAVDTDTFSFGVVVLETLAGQRAVKTHGARTKYLKDLVEEEAEEAGVALRSTQSTLQAGLAADAWAAPIAMQIYKKHLDPRPGPCPPELGLGLGQLACCCLHRRAKRRPPMTQVYERLEKLQAVVAGVPGHSEAASCIPPSPQENSYVSSTGRAHSGAAPWQPLAAPSGASAQAAEQLQRGPNQPVESDESLGGLSAALRSWHLTPSCPLDPAPLREAGCPQGDTAGESSWGSGPGSRPTAVEGLALGSSASSSSEPPQIIINPARQKMVQKLALYEDGALDSLQLLSSSSLPGLGLEQDRQGPEESDEFQS

1-28. (canceled)

29. A composition comprising:
(a) one, two, three, four or five isolated nucleic acids represented by SEQ ID NO:1; SEQ ID NO:2; SEQ ID NO:3; SEQ ID NO:5; and/or SEQ ID NO:6; or fragments thereof that comprise at least about 10 contiguous nucleotides of said sequences, and/or
(b) one, two, three, four or five isolated nucleic acids represented by SEQ ID NO:31; SEQ ID NO:33; SEQ ID NO:34; SEQ ID NO:35; and/or SEQ ID NO:36; or fragments thereof that comprise at least about 10 contiguous nucleotides of said sequences, and/or
(c) one, two, three, four or five isolated nucleic acids represented by SEQ ID NO:61; SEQ ID NO:62; SEQ ID NO:64; SEQ ID NO:65; and/or SEQ ID NO:66; or fragments thereof that comprise at least about 10 contiguous nucleotides of said sequences, and/or
(d) one, two, three, four or five isolated nucleic acids represented by SEQ ID NO:91; SEQ ID NO:92; SEQ ID NO:93; SEQ ID NO:94; and/or SEQ ID NO:95; or fragments thereof that comprise at least about 10 contiguous nucleotides of said sequences, and/or
(e) one, two, three, four or five isolated nucleic acids represented by SEQ ID NO:120; SEQ ID NO:121; SEQ ID NO:122; SEQ ID NO:123; and/or SEQ ID NO:125; or fragments thereof that comprise at least about 10 contiguous nucleotides of said sequences, and/or
(f) one or two isolated nucleic acids represented by SEQ ID NO:194 and/or SEQ ID NO:195, or fragments thereof that comprise at least about 10 contiguous nucleotides of said sequences.

30. The composition of claim 29, wherein each of (a), (b), (c), (d) and (e) comprises all five of the indicated nucleic acids and (f) comprises both of said nucleic acids.

31. The composition of claim 1, which is in the form of an aqueous solution.

32. The composition of claim 1, which is in the form of an array.

33. The array of claim 32, which comprises at least about 900 nucleic acids.

34. A composition comprising a set of two or more nucleic acid probes, each of which hybridizes with part or all of a coding sequence that is overexpressed in clear cell renal cell carcinoma (CC-RCC), papillary RCC, chromophobe/oncocytoma RCC, sarcomatoid RCC, TCC, or Wilms' tumors, which overexpression is based on comparison to a baseline value.

35. The composition of claim 34, wherein the baseline value is the expression of said coding sequence in normal renal tissue from (i) the subject from whom the tumor tissue is obtained or (ii) one or more normal individuals.

36. The composition of claim 34, which is in the form of an array.

37. The composition of claim 35, which is in the form of an array.

38. The composition of claim 29, wherein one or more of the nucleic acids comprise nucleotides having at least one modified phosphate backbone selected from a phosphorothioate, a phosphoridothioate, a phosphoramidothioate, a phosphoramidate, a phosphordiimidate, a methylsphosphonate, an alkyl phosphotriester, 3′-aminopropyl, a formacetal, or an analogue thereof.

39. The composition of claim 34, wherein one or more of the nucleic acids comprise nucleotides having at least one modified phosphate backbone selected from a phosphorothioate, a phosphoridothioate, a phosphoramidothioate, a phosphoramidate, a phosphordiimidate, a methylsphosphonate, an alkyl phosphotriester, 3′-aminopropyl, a formacetal, or an analogue thereof.

40. The array of claim 32 further comprising, bound to one or more nucleic acids of the array, one or more polynucleotides from a sample representing expressed genes, wherein the sample is from an individual subject's renal tumor, from normal tissue, or from both tumor and normal tissue.

41. The array of claim 36, further comprising, bound to one or more nucleic acids of the array, one or more polynucleotides from a sample representing expressed genes, wherein the sample is from an individual subject's renal tumor, from normal tissue, or from both tumor and normal tissue.

42. The array of claim 32, wherein the nucleic acids of the array have been hybridized under conditions of high stringency to one or more polynucleotides from a sample representing expressed genes, wherein the sample is from an individual subject's renal tumor, from normal tissue, or from both tumor and normal tissue.

43. The array of claim 36, wherein the nucleic acids of the array have been hybridized under conditions of high stringency to one or more polynucleotides from a sample representing expressed genes, wherein the sample is from an individual subject's renal tumor, from normal tissue, or from both tumor and normal tissue.

44. The composition of claim 29, wherein the isolated nucleic acids are of human origin.

45. The composition of claim 34, wherein the isolated nucleic acids are of human origin.

46. A composition comprising
(a) one, two, three, four or five of the following isolated polypeptides: SEQ ID NO:196; SEQ ID NO:197; SEQ ID NO:198; SEQ ID NO:199 or 200; and/or SEQ ID NO:201, or an antigenic fragment[s] of said polypeptide, and/or
(b) one, two, three, four or five of the following isolated polypeptides: SEQ ID NO:221; SEQ ID NO:222; SEQ ID NO:223; SEQ ID NO:224; and/or SEQ ID NO:225, or an antigenic fragment[s] of said polypeptide, and/or
(c) one, two, three, four or five of the following isolated polypeptides: SEQ ID NO:248; SEQ ID NO:249; SEQ ID NO:250; SEQ ID NO:251; and/or SEQ ED NO:252, or an antigenic fragment[s] of said polypeptide, and/or
(d) one, two, three, four or five of the following isolated polypeptides: (i) a polypeptide encoded by an open reading frame (ORF) that includes the nucleotide sequence SEQ ID NO:91; (ii) SEQ ID NO:271 or 272; (iii) SEQ ID NO:273; (iv) a polypeptide encoded by an ORF of SEQ ID NO:94; and/or (v) SEQ ID NO:274, or antigenic fragments thereof, and/or
(e) one, two, three, four or five polypeptides encoded by the following nucleic acids: (i) an ORF that includes SEQ ID NO:120; (ii) SEQ ID NO:121; (iii) SEQ ID NO:122; (iv) SEQ ID NO:123; and (v) SEQ ID NO:125; or an antigenic fragment[s] of said polypeptide, and/or
(f) one or two isolated polypeptides encoded by the nucleic acids SEQ ID NO:194 and/or SEQ ID NO:195; or an antigenic fragment[s] of said isolated polypeptide.

47. The composition of claim 46, wherein each of (a), (b), (c), (d) and (e) comprises all five of the indicated polypeptides or antigenic fragments, and (f) comprises both of said polypeptides or antigenic fragments.

48. A composition comprising antibodies specific for the polypeptides or fragments of the composition of claim 46.

49. The composition of claim 46, which is in the form of an array.

50. The composition of claim 47, which is in the form of an array.

51. The composition of claim 48, which is in the form of an array.

52. A method for determining the subtype of a renal carcinoma in a subject, comprising
(a) hybridizing nucleic acids of the composition of claim 29, under conditions of high stringency, to polynucleotides of a sample of the renal carcinoma; and
(b) comparing the amount of the sample polynucleotides hybridized to said nucleic acids of the composition, to a baseline value,
wherein the amount of sample polynucleotide hybridized is indicative of the level of expression of the polynucleotide or polynucleotides in the renal tumor, and wherein said level of expression is characteristic of the subtype of renal carcinoma.

53. The method of claim 52, wherein the nucleic acid composition is in the form of an array.

54. The method claim 52, wherein,
(a) when the expression of said sample polynucleotide, as determined by its hybridization to one or more nucleic acids listed in Table 1, is up-regulated compared to the baseline value, the renal tumor is a clear cell-RCC;
(b) when the expression of said sample polynucleotide, as determined by its hybridization to one or more nucleic acids listed in Table 2, is up-regulated compared to the baseline value, the renal tumor is a papillary RCC;
(c) when the expression of said sample polynucleotide, as determined by its hybridization to one or more nucleic acids listed in Table 3, is up-regulated compared to the baseline value, the renal tumor is chromophobe-RCC/oncocytoma;
(d) when the expression of said sample polynucleotide, as determined by its hybridization to one or more nucleic acids listed in Table 5, is up-regulated compared to the baseline value, the renal tumor is a sarcomatoid-RCC;
(e) when the expression of said sample polynucleotide, as determined by its hybridization to one or more nucleic acids listed in Table 6, is up-regulated compared to the baseline value, the renal tumor is a transitional cell carcinoma; and
(f) when the expression of said sample polynucleotide, as reflected by its hybridization to one or more nucleic acids represented by SEQ ID NO:194 or SEQ ID NO:195, is up-regulated compared to the baseline value, the renal tumor is a Wilms' tumor.

55. The method claim 53, wherein,
(a) when the expression of said sample polynucleotide, as determined by its hybridization to one or more nucleic acids listed in Table 1, is up-regulated compared to the baseline value, the renal tumor is a clear cell-RCC;
(b) when the expression of said sample polynucleotide, as determined by its hybridization to one or more nucleic acids listed in Table 2, is up-regulated compared to the baseline value, the renal tumor is a papillary RCC;
(c) when the expression of said sample polynucleotide, as determined by its hybridization to one or more nucleic acids listed in Table 3, is up-regulated compared to the baseline value, the renal tumor is chromophobe-RCC/oncocytoma;
(d) when the expression of said sample polynucleotide, as determined by its hybridization to one or more nucleic acids listed in Table 5, is up-regulated compared to the baseline value, the renal tumor is a sarcomatoid-RCC;
(e) when the expression of said sample polynucleotide, as determined by its hybridization to one or more nucleic acids listed in Table 6, is up-regulated compared to the baseline value, the renal tumor is a transitional cell carcinoma; and
(f) when the expression of said sample polynucleotide, as reflected by its hybridization to one or more nucleic acids represented by SEQ ID NO:194 or SEQ ID NO:195, is up-regulated compared to the baseline value, the renal tumor is a Wilms' tumor.

56. The method of claim 52, wherein said sample polynucleotide is labeled with a detectable label.

57. The method of claim 56, wherein the detectable label is a fluorescent label.

58. A method for determining the subtype of a renal carcinoma in a subject, comprising
(a) contacting the antibody composition of claim 48 with a polypeptide sample obtained from the renal carcinoma, under conditions effective for an antibody to bind specifically to a polypeptide; and
(b) comparing the amount of said binding to a baseline value,
wherein the amount of binding of said sample polypeptide to said specific antibody or antibodies of said composition is indicative of the level of expression of the polypeptide in the renal tumor, and wherein said level of expression is characteristic of the subtype of renal carcinoma.

59. A kit for detecting the presence and/or amount of a polynucleotide in a renal tumor sample, which presence and or/amount is indicative of a subtype of renal carcinomas, the kit comprising:
(a) the nucleic acid composition of claim 29; and, optionally,
(b) one or more reagents that facilitates hybridization of nucleic acids of the composition to the sample polynucleotide, and/or that facilitates detection of the hybridized polynucleotide.

60. A kit for detecting the presence and/or amount of a polynucleotide in a renal tumor sample, which presence and or/amount is indicative of a subtype of renal carcinomas, the kit comprising:
(a) the nucleic acid composition of claim 34; and, optionally,
(b) one or more reagents that facilitates hybridization of nucleic acids of the composition to the sample polynucleotide, and/or that facilitates detection of the hybridized polynucleotide.

61. The kit of claim 59, wherein the nucleic acid composition is in the form of an array of said nucleic acids.

62. The kit of claim 60, wherein the nucleic acid composition is in the form of an array of said nucleic acids.

63. A kit for detecting the presence and/or amount of a polypeptide in a renal tumor sample, which presence and/or amount is indicative of subtype of renal carcinoma, comprising:
(a) the antibody composition of claim 48; and, optionally,
(b) one or more reagents that facilitates binding of the antibodies of the composition to the sample polypeptide, and/or that facilitates detection of antibody binding.

64. The kit of claim 63, wherein the antibody composition is in the form of an array of said antibodies.
